(19) United States
(12) Patent Application Publication
(10) Pub. No.: US 2003/0054522 A1
(43) Pub. Date: Mar. 20, 2003

(54) Genomic sequence of NGR234 symbiotic plasmid, its gene map, and its use in diagnostics and gene transfer in agriculture

(76) Inventors: Andre Rosenthal, Berlin (DE); Christoph Bernward Freiberg, Wuppertal (DE); Xavier Philippe Perret, Geneva (CH); William John Broughton, Geneva (CH)

Correspondence Address: Woodcock Washburn Kurtz, Mackiewicz & Norris LLP, 46th Floor, One Liberty Place, Philadelphia, PA, 19103, US

(21) Appl. No.: 09/939,964

(22) Filed: Aug. 27, 2001

Related U.S. Application Data
(63) Continuation of application No. 09/214,808, filed on Jun. 22, 1999.

(30) Foreign Application Priority Data
Jul. 12, 1996 (EP) 96730001.3
May 20, 1997 (GB) 9710395.6

(51) Int. Cl. C12N 9/06; C07H 21/04; C12P 21/02; C12N 5/04; C12N 9/24

(52) U.S. Cl. 435/191; 435/410; 435/320.1; 435/69.1; 536/23.2; 435/200

(57) ABSTRACT

The sequencing and analysis of the complete nucleotide sequence of symbiotic plasmid pNGR234a isolated from Rhizobium sp. NGR234. The complete sequence of pNGR234a is presented. The analysis includes the identification of a number of novel ORFs and the proteins expressible therefrom which have been ascribed putative functions.

### TECHNICAL FIELD

[0001] This invention relates to a symbiotic plasmid of the broad host-range Rhizobium sp. NGR234 and its use. In particular, this invention relates to the isolation and analysis of the complete sequence of the NGR234 symbiotic plasmid pNGR234a, and the open reading frames (ORFs) identifiable therein as well as the proteins expressible from said ORFs.

### BACKGROUND OF THE INVENTION

[0002] Together with carbon, hydrogen and oxygen, nitrogen is one of the essential components in organic chemistry. Although it is present in vast quantities in the atmosphere, nitrogen in its diatomic form N₂ remains unassimilable by living organisms. The nitrogen cycle begins by the fixation of nitrogen into ammonia which is chemically more reactive and can be assimilated into the food chain. A large fraction of the total nitrogen fixed every year is produced by microorganisms. Among these, the soil bacteria of the genera Azorhizobium, Bradyrhizobium, Sinorhizobium and Rhizobium, generally referred to as rhizobia, fix nitrogen in symbiotic associations with many plants from the Leguminosae family. This highly specific interaction leads to the formation of specialized root-, and in the case of Azorhizobium, stem-structures called nodules. It is within these nodules that rhizobia differentiate into bacteroids capable of fixing atmospheric nitrogen into ammonia. In turn, ammonia diffuses into the vegetal cells and sustains plant growth even under limiting nitrogen conditions.

[0003] The Rhizobium-legume interaction presents many interesting features. Obviously, the possibility of using this symbiosis as an “environmentally friendly” way to provide some of the most important world crops (such as soybean, bean and many other legumes) with fixed nitrogen without using nitrate-rich fertilizers, has important economic consequences. It is also an ideal model to study a non-pathogenic interaction between bacteria and a highly developed, multicellular organism such as the host plant. Furthermore, the various steps involved in the establishment of a functional nitrogen symbiosis, which include some dramatic morphological changes as well as processes of cellular differentiation, require a complex exchange of molecular signals. Despite many decades of studies, it is only recently that the Rhizobium-legume interaction has been partially understood at the molecular level. The establishment of a functional symbiosis can be divided into two major steps as follows.

[0004] (A) Rhizosphere Ecology and Nodulation

[0005] Rhizobia are soil bacteria that proliferate in the rhizosphere of compatible plants, taking advantage of the many compounds released by plant roots. In return it has been shown that the presence of rhizobia in the rhizosphere reduces susceptibility of plants to many root diseases. In the case of low nitrogen levels in the soil, compatible rhizobia can interact with host plants and start the nodulation process (Long, 1989; Fellay et al., 1995; van Rhijn and Vanderleyden, 1995). Molecular signalling between the two partners begins with the release by the plant of phenolic compounds (mostly flavonoids) that induce the expression of nodulation genes (referred to as nod, nol and noe genes). The NodD1 gene product appears to be the central mediator between the plant signal and nodulation gene induction (Bender et al., 1988). It is modified by the binding of flavonoids and acts as a positive regulator on the expression of the remaining nodulation genes. Among them, the nodABC loci encode products responsible for the synthesis of the core structure of lipooligosaccharides called Nod factors (Relic et al., 1994). More nodulation genes are involved in strain-specific modifications of the Nod factors as well as in its secretion. It seems established now that variability in the structure of Nod factors may play a significant role in the determination of the host-range of a given Rhizobium strain, that is in its ability to efficiently nodulate different legumes. For example, the strain Rhizobium meliloti can only nodulate Medicago, Melilotus and Trigonella ssp., whereas Rhizobium sp. NGR234 can symbiotically interact with more than 105 different genera of plants, including the non-legume Parasponia andersonii.

[0006] The structure of many Nod factors, their isolation from Rhizobium strains and their commercial application in agriculture have been described (NodNGR-Faktoren: Relić et al., 1994; WO 94/00466; NodRm-Faktoren: WO 91/15496). Secreted Nod factors act in turn as signal molecules that allow rhizobia to enter young root hairs of a host plant, and induce root-cortical cell division that will produce the future nodule. Invaginated rhizobia progress towards the forming nodule within infection threads that are synthesized by the plant cells. Bacteria are then released into the cytoplasm of dividing nodule cells where they differentiate into bacteroids capable of fixing atmospheric nitrogen.

[0007] With respect to regulation of the nodulation genes, other regulatory genes with similarities to nodD1 (genes that belong to the lysR family) have been identified in various strains (Davis and Johnston, 1990). The function of these genes, called nodD2, nodD3 or syrM, is only partially understood. Some nodD genes have been described (WO 94/00466; CA 1314249; WO 87/07910; U.S. Pat. No. 5,023,180). Also, recombinant DNA molecules including the consensus sequence of the promoters of nodD1-regulated genes, called nod-boxes (Fisher and Long, 1993), have been disclosed (U.S. Pat. No. 5,484,718; U.S. Pat. No. 5,085,588). Finally, recombinant plasmids with the nodABC genes or, in one case (Bradyrhizobium japonicum), a sequence influencing host specificity have been disclosed (U.S. Pat. No. 5,045,461; U.S. Pat. No. 4966847).

[0008] (B) Symbiotic Nitrogen Fixation

[0009] Inside the nodules, rhizobia differentiate into bacteroids that express the enzymatic complex (nitrogenase) required for the reduction of atmospheric nitrogen into ammonia. The nitrogenase is encoded by three genes nifH, nifD and nifK which are well conserved in nitrogen fixing organisms (Badenoch-Jones et al., 1989). Many additional loci are necessary for functional nitrogenase activity. Those originally identified in Klebsiella pneumoniae are known as nif genes, whereas those found only in Rhizobium strains are described as fix genes (Fischer, 1994). Some of these gene products are required for the biosynthesis of cofactors, the assembly of the enzymatic complex or play regulatory and different accessory roles (oxygen-limited respiration, etc.). Many of these genes are less conserved among the various rhizobial strains and in some cases their function is still not fully understood. The high sensitivity of the nitrogenase complex to free oxygen requires a very strict control of most nif and fix gene expression. In this respect, the FixL, FixJ, FixK, NifA and RpoN proteins have been identified in representative Rhizobium species as the major regulatory elements that, in microanaerobic conditions, activate the synthesis of the nitrogenase complex (Fischer, 1994). Recombinant DNA molecules containing nif genes/promoters have been disclosed: nifH promoters of B. japonicum (U.S. Pat. No. 5008194), nifH and nifD promoter of R. japonicum (EP 164245), nifA of B. japonicum and R. meliloti (EP 339830), nifHDK and hydrogen-uptake (hup) genes of R. japonicum (EP 205071).

[0010] Many more genetic determinants play a significant role in the Rhizobium-legume symbiosis. Genes (exo, lps and ndv genes) involved in the production of extracellular polysaccharides (EPS), lipopolysaccharides (LPS) and cyclic glucanes of rhizobia play an essential role in the symbiotic interaction (Long et al., 1988; Stanfield et al., 1988). Mutation in these genes negatively influences the development of functional nodules. In this respect, some exopolysaccharides of the NGR234 derivative strain ANU280, have been disclosed (WO 87/06796). Although Nod factors seem to play a key role in the nodulation process, experimental data indicate that other signal molecules produced by the bacterial symbionts are required for functional symbiosis and may play a role in coordinating various steps such as the controlled invasion process, the release of rhizobia from the infection thread into the plant cell cytoplasm, the bacteroid differentiation process, etc. Moreover, the need for rhizobia to survive in the rhizosphere and to compete adequately with other microorganisms requires many more unidentified genes that, although they may not be characterised as proper symbiotic loci, do affect the efficiency of the various strains to induce functional nitrogen fixing symbiosis in field conditions. Finally, in our view genetic engineering of improved rhizobial strains cannot be pursued without a more extended knowledge of the structure and complexity of the Rhizobium symbiotic genome.

[0011] In this respect we decided to determine the complete DNA sequence of a symbiotic plasmid of Rhizobium sp. NGR234. In contrast to Bradyrhizobium and Azorhizobium that carry symbiotic genes on large chromosomes (ca. 8 Mbp) and to R. meliloti that harbours two very large symbiotic plasmids of 1.4 and 1.6 Mbp, NGR234 carries a single plasmid of ca. 500 kbp, pNGR234a. Moreover, it has been shown by transfer of pNGR234a into heterologous rhizobia, and even into non-nodulating Agrobacterium tumefaciens, that most nodulation functions are encoded by this plasmid (Broughton et al., 1984). The fact that NGR234 is able to interact symbiotically with more plants than any other known strain, and that a complete ordered cosmid library of pNGR234a was available, reinforced NGR234 as the best choice for a large-scale sequencing effort on a symbiotic plasmid (Perret et al., 1991; Freiberg et al., 1997).

[0012] Automated fluorescent methods have been used to sequence cosmids from eukaryotic organisms, including Saccharomyces cerevisiae (Levy, 1994), Caenorhabditis elegans (Sulston et al., 1992), Drosophila melanogaster (Hartl and Palazzolo, 1993), and Homo sapiens (Bodmer, 1994), as well as chromosomes from the prokaryotes Haemophilus influenzae (Fleischmann et al., 1995) and Mycoplasma genitalium (Fraser et al., 1995). In most large-scale sequencing centres this technology is based mainly on the shotgun approach. After random fragmentation of DNA (e.g. cosmids, bacterial artificial chromosomes (BACs), entire chromosomes) using sonication or mechanical forces, size-selected fragments are subcloned into M13 phages, phagemids or plasmids and sequenced by cycle sequencing using dye primers (Craxton, 1993). A disadvantage of this method is that DNA regions with elevated GC contents produce large numbers of compressions (unresolvable foci in sequence gels) in the dye primer sequences leading to several hundred compressions per assembled cosmid sequence. It is known that the use of dye terminators—fluorescently labelled dideoxynucleoside triphosphates—instead of dye primers reduces the number of compressions (Rosenthal and Charnock-Jones, 1993). Therefore, dye terminators are frequently being used for gap closure and proofreading after assembly of the shotgun data.

[0013] To sequence GC-rich cosmids with the highest accuracy, the effectiveness of shotgun sequencing with dye terminators in comparison to dye primer sequencing was investigated. To improve the incorporation of dye terminators into DNA, a modified Tag DNA polymerase carrying a single mutation was used (Tabor and Richardson, 1995). This enzyme has properties similar to a thermostable “sequenase” and is commercially available as Thermo Sequenase (Amersham, Buckinghamshire, UK) or AmpliTaq FS (Perkin-Elmer, Foster City, Calif., USA). Concentrations of dye terminators needed in the cycle sequencing reactions can be reduced by 20-250 times. It was found that dye terminator shotgun sequencing leads to compression-free raw data that can be assembled much faster than shotgun data mainly obtained by dye primer sequencing. This strategy thus allows a several-fold increase in speed to sequence individual cosmids. This was demonstrated by comparing assembly of the sequence data of two cosmids from pNGR234a generated by different chemistries: Cosmid pXB296 was sequenced with dye terminators, whereas data for pXB110 were obtained using the common dye primer method. Also disclosed is the analysis of the entire pXB296 sequence.

[0014] Moreover, the dye terminator shotgun sequencing strategy used to generate the sequence data for pXB296 was also used to sequence all the other remaining overlapping cosmids of the plasmid pNGR234a. In summary, 20 cosmids have been sequenced together with two PCR products and a subcloned DNA fragment derived from a cosmid identified as pXB564 in order to generate the plasmid's complete nucleotide sequence.

[0015] After its assembly, the analysis of the entire nucleotide sequence of pNGR234a, especially the determination of putative coding regions and the prediction of their expressible proteins and putative functions, was performed. Initially, analysis of the region covered by cosmid pXB296 was extended to cosmids pXB368 and pXB110. Thus, in approximately 100 kb of the plasmid (position 417,796-517,279) most ORFs and their deduced proteins with different putative functions were predicted. Subsequently, the rest of pNGR234a was analyzed.

### SUMMARY OF THE INVENTION

[0016] The present invention provides the complete nucleotide sequence of symbiotic plasmid pNGR234a or degenerate variants thereof of Rhizobium sp. NGR234.

[0017] The present invention also contemplates sequence variants of the plasmid pNGR234a altered by mutation, deletion or insertion.

[0018] Also encompassed by the present invention are each of the ORFs derivable from the nucleotide sequence of pNGR234a or variants thereof.

[0019] In a preferred embodiment, the ORFs derived from the nucleotide sequence of pNGR234a encode the functions of nitrogen fixation, nodulation, transportation, permeation, synthesis and modification of surface poly- or oligosaccharides, lipo-oligosaccharides or secreted oligosaccharide derivatives, secretion (of proteins or other biomolecules), transcriptional regulation or DNA-binding, peptidolysis or proteolysis, transposition or integration, plasmid stability, plasmid replication or conjugal plasmid transfer, stress response (such as heat shock, cold shock or osmotic shock), chemotaxis, electron transfer, synthesis of isoprenoid compounds, synthesis of cell wall components, rhizopine metabolism, synthesis and utilization of amino acids, rhizopines, amino acid derivatives or other biomolecules, degradation of xenobiotic compounds, or encode proteins exhibiting similarities to proteins of amino acid metabolism or related ORFs, or enzymes (such as oxidoreductase, transferase, hydrolase, lyase, isomerase or ligase).

[0020] In another preferred embodiment, the ORFs are under the control of their natural regulatory elements or under the control of analogues to such natural regulatory elements.

[0021] The present invention also provides the sequences of the intergenic regions of pNGR234a which, in a preferred embodiment, are regulatory DNA sequences or repeated elements. In a further preferred embodiment, the intergenic sequences are ORF-fragments.

[0022] Also provided by the present invention are mobile elements (insertion elements or mosaic elements) derivable from the nucleotide sequences of the present invention.

[0023] The present invention also contemplates the use of the disclosed nucleotide sequences or ORFs in the analysis of genome structure, organisation or dynamics.

[0024] Also provided by the present invention is the use of the nucleotide sequences or ORFs in the subcloning of new nucleotide sequences. In a preferred embodiment, the new nucleotide sequences are coding sequences or non-coding sequences.

[0025] In yet a further preferred embodiment, the nucleotide sequences or ORFs are used in genome analysis and subcloning methods as oligonucleotide primers or hybridization probes.

[0026] The present invention further provides proteins expressible from the disclosed nucleotide sequences or ORFs.

[0027] Also contemplated by the present invention is the use of the disclosed nucleotide sequences, individual ORFs or groups of ORFs or the proteins expressible therefrom in the identification and classification of organisms and their genetic information, the identification and characterisation of nucleotide sequences, the identification and characterisation of amino acid sequences or proteins, the transportation of compounds to and from an organism which is host to said nucleotide sequences, ORFs or proteins, the degradation and/or metabolism of organic, inorganic, natural or xenobiotic substances in a host organism, or the modification of the host-range, nitrogen fixation abilities, fitness or competitiveness of organisms.

[0028] The present invention also provides plasmid pNGR234a of Rhizobium sp. NGR234 comprising the disclosed nucleotide sequence or any degenerate variant thereof.

[0029] The present invention also provides a plasmid harbouring at least one of the disclosed ORFs or any degenerate variant thereof.

[0030] The plasmids of the invention may be produced recombinantly and/or by mutation, deletion, insertion or inactivation of an ORF, ORFs or groups of ORFs.

[0031] The present invention also provides the use of the disclosed plasmids or variants thereof in obtaining a synthetic minimal set of ORFs required for functional Rhizobium-legume symbiosis, the modification of the host-range of rhizobia, the augmentation of the fitness or competitiveness of Rhizobium sp. NGR234 in the soil and its nodulation efficiency on host plants, the introduction of desired phenotypes into host plants using the disclosed plasmids as stable shuttle systems for foreign DNA encoding said desired phenotypes, or the direct transfer of the disclosed plasmids into rhizobia or other microorganisms without using other vectors for mobilization.

[0032] The nucleotide sequences of the present invention were advantageously obtained using known cycle sequencing methods. The preferred dye terminator/thermostable sequenase shotgun sequencing method used to generate the nucleotide sequences of the present invention, when applied to cosmids and when compared to other sequencing methods, was shown to yield sequence reads of the highest fidelity. Consequently, the speed of assembly of particular cosmids was increased, and the resultant high-quality sequences required little editing or proofreading. Thus, the preferred sequencing method described herein was successfully used to generate the complete nucleotide sequence of all the overlapping cosmids of plasmid pNGR234a, thereby resulting in the assembly of the complete sequence of the plasmid.

[0033] The complete sequence of pNGR234a is disclosed for the first time in this application, as are the majority of the ORFs predicted within the sequence. Putative functions have been ascribed to the novel and inventive ORFs disclosed herein and the proteins for which they code.

### BRIEF DESCRIPTION OF DRAWINGS

[0034] The present invention is described below and illustrated thereafter in the appended examples, with reference to the following figures:

[0035] FIG. 1 A comparative graph showing the comparison of sequences from pXB296 created by different cycle sequencing methods.

[0036] FIG. 2 A schematic diagram showing the organization of the predicted ORFs in pXB296 from Rhizobium sp. NGR234.

[0037] FIG. 3 The complete nucleotide sequence of plasmid pNGR234a (with the pages labelled sequentially from 19961 to 1996142).

[0038] FIG. 4 A schematic diagram showing the map of the 20 sequenced cosmids covering the 536 kb symbiotic plasmid pNGR234a of Rhizobium sp. NGR234.

[0039] FIG. 5 A diagram indicating multiple alignments of the nucleotide sequence of the replication origins of various plasmids.

[0040] FIG. 6 A diagram indicating multiple DNA sequence alignments of the regions containing the origin of transfer of various plasmids.

[0041] FIG. 7 A schematic diagram showing a circular representation of the symbiotic plasmid pNGR234a of NGR234.

### DETAILED DESCRIPTION OF THE INVENTION AND BEST MODE

[0042] Comparison of Different Shotgun Sequencing Strategies

[0043] The following is a more detailed description of certain key aspects of the present invention.

[0044] GC-rich cosmids were examined to investigate whether they could be sequenced much more efficiently using dye terminators throughout the shotgun phase instead of dye primers. As a test case, cosmid pXB296 with a GC content of 58 mol % from pNGR234a, the symbiotic plasmid of Rhizobium sp. NGR234, was exclusively sequenced using dye terminators in combination with a thermostable sequenase [Thermo Sequenase (Amersham)]. Another rhizobial cosmid with identical GC content, pXB110, was sequenced using traditional dye primer chemistry and Taq DNA polymerase.

[0045] Using the dye terminator/thermostable sequenase shotgun strategy, it was shown that most, if not all, compressions could be resolved and reads were produced with the highest fidelity among all sequencing chemistries tested. As a result, a much faster assembly of cosmid pXB296 in comparison to pXB110 was obtained. The shotgun data could be assembled into a high-quality sequence without extensive editing and proofreading. By measuring the error rate in overlapping regions between individual cosmids from pNGR234a, as well as the cosmid vector sequence itself (data not shown), it was estimated that the accuracy of the pXB296 sequence is higher than 99.98%. Using other thermostable sequenases such as AmpliTaq FS (Perkin-Elmer), similar results were expected because thermostable sequenases have similar properties.

[0046] Dye primer chemistry in combination with Thermo Sequenase was also examined. Although the peak uniformity of signals was much improved over dye primer/Taq DNA polymerase data, the number of compressions in GC-rich shotgun reads was not reduced significantly. Compressions in shotgun raw data enormously increase the overall effort of editing, proofreading, and finishing a cosmid as shown for pXB110 (Table 1).

[0047] Because of their longer reading potential, dye primer reads are helpful for gap closure. However, using ABI 373A sequencers (Applied Biosystems, Inc. (ABI), Perkin-Elmer, Foster City, Calif., USA), dye primer reads are, on average, only ˜50 bases longer than dye terminator reads.

[0048] Using the experimental conditions of the present invention, shotgun sequencing with dye terminators and a thermostable sequenase is superior because for GC-rich cosmid templates it removes most of the compressions and this leads to a several-fold improvement in assembling and finishing of cosmid-sized projects. Although dye terminators are slightly more expensive than dye primers, the overall saving in time for finishing projects has, in our experience, a much greater effect on general costs.

[0049] It has been shown that the strategy of the present invention is effective for high-throughput shotgun sequencing of GC-rich templates. This strategy was therefore used to sequence the remaining 19 overlapping cosmids of the symbiotic plasmid pNGR234a of Rhizobium sp. NGR234. In total, 20 cosmids, two PCR products (1.5 and

TABLE 1
Comparison of the assembly of the sequence data from cosmids
pXB296 (dye terminator shotgun reads) and pXB110 (dye primer
shotgun reads)

| Data assembly | pXB296 | pXB110 |
|---|---|---|
| Average length of the shotgun reads (bases) | 332 | 378 |
| No. of shotgun reads used for assembly | 786 | 899 |
| No. of shotgun reads assembled with 4% mismatch^{a} | 736 | 308 |
| No. of shotgun reads assembled with 25% mismatch^{a} | 775 | 879 |
| No. of contigs^{b} longer than 1 kbp | 3 | 25 |
| No. of contigs left after editing^{c} | 2 | 4 |
| No. of additional reads (gap closure and proofreading)^{d} | 32 | 191 |
| Total length of cosmid insert (bp) | 34,010 | 34,573 |
| Sequencing redundancy (per bp) | 8.0 | 10.5 |
| ^{a}Assembling program: XGAP; principal autoassembling conditions: normal shotgun assembly, joins | | |
| # permitted, minimum initial match = 15, maximum no. of pads per reading during the alignment procedure = 8, | | |
| # maximum no. of pads per reading in contig to align any new reading = 8, alignment mismatches 4% and 25%, | | |
| # respectively. | | |
| ^{b}Contiguous parts of sequence created by overlapping reads. | | |
| ^{c}Lengths of contigs: 6-10 kbp (pXB296); 2-12 kbp (pXB110). | | |
| ^{d}Reads necessary for closing gaps and making single-stranded regions double-stranded by primer walking | | |
| # on selected templates and, in case of pXB110, for solving ambiguities (compressions) by the resequencing of clones | | |
| # with universal primer and dye terminators. | | |

[0050] 2.0 kb in length) and a 1.5 kb restriction fragment were sequenced in order to generate the complete pNGR234a sequence (FIG. 4).

[0051] Genetic organization of pXB296

[0052] All 28 predicted open reading frames (ORFS) in pXB296 (FIG. 2) show significant homologies to database entries (Table 2). The first putative gene cluster (cluster I) containing ORF1 to ORF5 corresponds to various oligopeptide permease operons (Hiles et al., 1987; Perego et al., 1990). Only ORF5 shows homology to a gene from a different bacterium, Bacillus anthracis (Makino et al., 1989). Each homologue encodes membrane-bound or membrane-associated proteins suggesting that all five ORFs are involved in oligopeptide permeation.

[0053] Organization of the predicted gene cluster IV, including the nifA homologue ORF16 (fixABCX, nifA, nifB, fdxN, ORF, fixU homologues, position 16,746-24,731), the predicted locations of the σ⁵⁴-dependent promoters and the nifA upstream activator sequences (FIG. 2), correspond to the organization found in Rhizobium meliloti and Rhizobium leguminosarum bv. trifolli. (Iismaa et al., 1989; Fischer, 1994). NifA is a positive transcriptional activator (Buikema et al., 1985), whereas nif and fix genes are essential for symbiotic nitrogen fixation. Identification of σ⁵⁴-dependent promoter sequences, together with the upstream activator motifs upstream of ORF21, ORF22, and ORF23, suggests that these ORFs may play an important, but still undefined, role in symbiosis.

[0054] Inevitably, large-scale sequencing uncovers differences with already published sequences. van Slooten et al. (1992) cloned a 5.8 kb EcoRI fragment from Rhizobium sp. NGR234 and sequenced 2067 bp by manual radioactive methods (EMBL accession no. S38912). This sequence exhibits 2.4% mismatches with the corresponding sequence in pXB296.

TABLE 2

Putative ORFs of pXB296 and homologies of the deduced amino acid sequences to
known proteins

| | | | | | | |
|---|---|---|---|---|---|---|
| | riboso- | | | | | |
| | mal binding site: | | homo- | | | |
| | SD-sequence-dis- | | logous | | | |
| | tance from start | no. of | amino | homologous | | |
| position on | codon (bases)- | deduced | acids | protein | iden- | simi- |

| | | | | | | | | | | | |
|---|---|---|---|---|---|---|---|---|---|---|---|
| | | cosmid | start codon^{d} | amino | (po- | | length | | acces- | tity | larity |
| ORF^{a} | st.^{b} | (based no.)^{c} | SD-sequence: | acids | sition) | name | (aa)^{c} | function^{f} | sion no | (%)^{g} | (%)^{g} |

| ORF1^{h} | + | 00001-00625 | 5′-TAAGGAGGTGA-3′ | >207 | 1-207 | OppB | 306 | oligopeptide | X05491 | 45 | 68 |
|---|---|---|---|---|---|---|---|---|---|---|---|
| ORF2 | + | 00628-01503 | GTATCCGGT-7-ATG | 291 | 2-289 | OppC | 305 | permease | X56347 | 37 | 63 |
| ORF3 | + | 01505-02512 | AGCGGAGG-7-ATG | 335 | 8-327 | OppD | 336 | proteins | X56347 | 49 | 69 |
| ORF4 | + | 02509-03570 | TGAAGTGGT-6-ATG | 353 | 2-323 | OppF | 334 | | X05491 | 51 | 69 |
| ORF5 | + | 03606-04991 | CAAGGA-6-ATG | 461 | 1-458 | CapA | 411 | encapsulation | M24150 | 25 | 48 |
| | | | | | | | | protein | | | |
| ORF6 | + | 05460-06863 | CCGAGAGG-8-ATG | 467 | 1-464 | BioA | 455 | aminotrans- | M29292 | 29 | 55 |
| | | | | | | | | ferase | | | |
| ORF7 | + | 06888-08426 | GCCTTCGG-5-GTG | 512 | 97-509 | ORFⁱ | 417 | unknown | D37877 | 36 | 58 |
| | | | | | 34-510 | GapD | 482 | succinic | M38417 | 33 | 57 |
| | | | | | | | | semialdehyde | | | |
| | | | | | | | | dehydrogenase | | | |
| ORF8 | − | 09781-10860 | GAACGTGG-8-ATG | 359 | 72-299 | ORFⁱ | 414 | transposase | X15942 | 30 | 48 |
| | | | | | | | | homologue | | | |
| | | | | | | | | minicircle DNA | | | |
| ORF9 | + | 11124-12455 | ?-7-ATG | 443 | 2-443 | GLUDI | 558 | glutamate | M37154 | 41 | 60 |
| | | | | | | | | dehydrogenase | | | |
| ORF10 | − | 13370-14116 | AAAGGA-6-ATG | 248 | 1-245 | ORF2¹ | 231 | transposase | X79443 | 45 | 64 |
| ORF11 | − | 14128-15672 | CATGGAG-7-TTG | 514 | 1-513 | ORF1¹ | 558 | homologues, | X79443 | 41 | 62 |
| | | | | | | | | IS1162 | | | |
| ORF12 | − | 16712-16942 | GAAGGA-8-ATG | 76 | 1-70 | FixU | 70 | unknown | P42710 | 63 | 80 |
| ORF13 | − | 16939-17265 | ACAAGAGG-7-ATG | 109 | 1-79 | ORF2ⁱ | >78 | unknown | X07567 | 53 | 81 |
| | | | | | 15-107 | NifZ | 159 | involved in | M20568 | 39 | 56 |
| | | | | | | | | FeMocofactor | | | |
| | | | | | | | | synthesis | | | |
| ORF14 | − | 17349-17543 | CCAGGAG-9-ATG | 64 | 1-64 | FdxN | 64 | ferredoxin- | M21841 | 80 | 87 |
| | | | | | | | | like | | | |
| ORF15 | − | 17585-19066 | AGTGGAG-7-ATG | 493 | 1-493 | NifB | 490 | involved in | M15544 | 73 | 84 |
| | | | | | | | | FeMocofactor | | | |
| | | | | | | | | synthesis | | | |
| ORF16 | − | 19292-20962 | ATTGG-12-ATG | 556 | 9-556 | NifA | 541 | transcrip- | X02615 | 59 | 72 |
| | | | | | | | | tional | | | |
| | | | | | | | | regulator | | | |
| ORF17 | − | 21129-21422 | AGGGGAG-7-ATG | 97 | 1-97 | FixX | 98 | required for | M15546 | 84 | 87 |
| ORF18 | − | 21437-22744 | AACTGAGGT-7-ATG | 435 | 1-435 | FixC | 435 | nitrogen | M15546 | 83 | 90 |
| ORF19 | − | 22755-23864 | ATAGGAG-6-ATG | 369 | 18-369 | FixB | 353 | fixation | M15546 | 79 | 89 |
| ORF20 | − | 23874-24731 | TAAAGAG-5-ATG | 285 | 1-285 | FixA | 292 | | M15546 | 74 | 85 |
| ORF21 | − | 25148-25468 | CCAGGAG-10-ATG | 106 | 1-106 | ORF118ⁱ | 108 | unknown | X13691 | 55 | 71 |
| ORF22 | − | 26145-26711 | GAAGGAG-9-ATG | 188 | 9-199 | − | 241 | hypothetical | U32739 | 47 | 64 |
| | | | | | | | | protein | | | |
| | | | | | 1-173 | − | 166 | peroxisomal | U11244 | 32 | 57 |
| | | | | | | | | protein | | | |
| ORF23 | + | 27169-27861 | GAAGGA-7-ATG | 230 | 1-167 | NifQ | 167 | probably in- | X13303 | 37 | 57 |
| | | | | | | | | volved in | | | |
| | | | | | | | | Mo-processing | | | |
| ORF24 | + | 27920-29434 | CTGGGAGG-18-ATG | 504 | 1-454 | DctA1 | 456 | C₄-dicarboxy- | S38912 | 97 | 98 |
| | | | | | | | | late | | | |
| | | | | | 8-454 | DctA2 | 449 | transporter | S38912 | 97 | 98 |
| ORF25 | + | 29431-30675 | TTCGGCGG-12-ATG | 414 | 2-414 | CamC | 415 | cytP450-like | M12546 | 34 | 53 |
| ORF26 | + | 30676-31332 | TTGGG-5-TTG | 218 | 30-190 | LinA | 155 | γ-hexachloro- | D90355 | 27 | 51 |
| | | | | | | | | cyclohexan- | | | |
| | | | | | | | | dechlorinase | | | |
| ORP27 | + | 31329-33035 | AGTGGAG-10-ATG | 568 | 28-270 | FabG | 244 | reductase | M84991 | 38 | 57 |
| | | | | | 294-534 | | | | | 30 | 57 |
| ORF28^{k} | + | 33173-34010 | CAAGGAG-5-ATG | >279 | 1-279 | LuxA | 355 | luciferase | M10961 | 23 | 49 |
| | | | | | | | | α-subunit | | | |
| ^{a}(ORF) Open reading frame. | | | | | | | | | | | |
| ^{b}(st.) Plus or minus strand. | | | | | | | | | | | |
| ^{c}Position on cosmid: from the first base of the start codon to the last base of the stop codon; alternative start points are 6912/6927/7017 (ORF7), 10665/10656 (ORF8), 11220 (ORF9), 15699/15651 (ORF 11), 17322/17271 (ORF13), 20995/21076 (ORF16), 26744 (ORF22), 27229/27304 (ORF23), 27941 (ORF24), and 30751/30754 (ORF26). | | | | | | | | | | | |
| ^{d}(SD sequence) Shine-Dalgarno sequence (Shine and Dalgarno 1974). Bases underlined are identical with the Shine-Dalgarno sequence. The following possible start codons were considered: ATG, GTG, or TTG. | | | | | | | | | | | |
| ^{e}(aa) Amino acids. | | | | | | | | | | | |
| ^{f}Organisms: Salmonella typhimurium, Bacillus subtilis (OppBCDF), Bacillus anthracis (CapA), Bacillus sphaericus (BioA), Streptomyces hygroscopius (ORF7 homolog), Escherichia coli (GapD). Streptomyces coelicolor (ORF8 homolog), Homo sapiens (GLUD1), Pseudomonas fluorescens (ORF10, ORF11 homologs). Rhizobium leguminosarum (FixU), Rhodobacter capsulatus (ORF13 homolog), Azo | | | | | | | | | | | |
| #tobacter vinelandii (NifZ), Rhizobium meliloti (FdxN, NifBA, FIxXCBA), Bradyrhizobium japonicum (ORF118), Haemophilus influenzae (hypothetical protein), Lipomyces kononenkoae (peroxisomal protein), Klebsiella pneumonia (NifQ), Rhizobium sp. NGR234 (DctA), Pseudomonas putida (CamC), Pseudomonas paucimobilis (LinA), Escherichia coli (FabG), Vibrio harveyi (LuxA). | | | | | | | | | | | |

^{g}identity and similarity were calculated using the program BESTFIT (Smith and Waterman 1981).
^{h}(ORF1) 3′ end.
ⁱTranslated ORF.
^{k}(ORF28) 5′ end.

[0055] It contains the gene dctA (encoding a C₄-dicarboxylate permease), which is 144 bases shorter than in pXB296. In this respect, a single nucleotide deletion in position 29,248 of the cosmid sequence close to the 3′ end of the gene causes a frameshift leading to a DctA product extended by 48 residues. van Slooten et al. (1992) also failed to identify the nifQ homologue, ORF23 (position 27,169-27,861), presumably because they overlooked a small XhoI fragment located between positions 27,349 and 27,536 on pXB296. Expression studies allowed these investigators to define a putative a σ⁵⁴-dependent promoter in a 1.7 kb SmaI fragment (position 27,094-28,818 in pXB296). This fragment stretches from the upstream region of ORF23 to the 5′ part of dctA. The 58 bp intergenic region between ORF23 and dctA contains a stem-loop structure but no obvious promoter sequence. Possibly the promoter that controls dctA is located upstream of ORF23 (e.g. the minimal consensus sequence included in GGGGGCACAATTGC at position 27,098-27,111). Although clones containing dctA complemented mutants of R. meliloti and R. leguminosarum for growth on dicarboxylates, the growth of the NGR234 dctA deletion mutant was not affected (van Slooten et al., 1992). Nevertheless, this mutant was unable to fix nitrogen in nodules. Because dctA is now possibly part of a larger transcription unit, the symbiotic phenotype may also result from the inactivation of downstream genes.

[0056] Interestingly, the GC content of the predicted pXB296 ORFs ranges from 53.3 mol % to 64.6 mol %, with an overall cosmid GC content of 58.5 mol %. Genomes of Azorhizobium, Bradyrhizobium, and Rhizobium species have GC contents of 59 mol % to 65 mol % (Padmanabhan et al., 1990), with 62 mol % reported for Rhizobium sp. NGR234 (Broughton et al., 1972). Although pXB296 covers <7% of the complete symbiotic plasmid sequence, its lower overall GC value suggests that symbiotic genes might have evolved by lateral transfer from other organisms. In this case, methods of the type applied in the present invention will become even more relevant in sequencing the whole genome.

[0057] Genetic Organization of the 100 kb Region Covered by Cosmids pXB296, pXB368 and pXB110

[0058] Extending the analysis of pXB296 to a 100 kb region stretching from position 417,796 to 517,279 on the symbiotic plasmid pNGR234a led initially to the assignation of only 76 ORFs listed within Table 3 (excluding the first incomplete ORF noted in the analysis of pXB296 (“ORF1” of Table 2)). The ORFs y4tQ to y4vJ (excluding ORFs y4uD and y4uG and excluding ORF-fragments fu1, fu2, fu3, fu4 and fv1; see Table 3) are identical to the ORFs 2 to 28 of the analysis of pXB296 in Table 2 apart from minor revisions (N.B. the analysis recited in Table 3 should be taken as the definitive analysis—Table 2 merely represents preliminary findings). The cosmid pXB110, which was sequenced with the dye primer shotgun sequencing strategy in order to compare it with the dye terminator shotgun sequencing strategy used to sequence cosmid pXB296, in combination with pXB296 and pXB368 cover nearly this entire region. A PCR product and a restriction fragment of cosmid pXB564 also had to be sequenced in order to fill in the gap from position 480,607 to 483,991 between cosmids pXB368 and pXB110 (FIG. 4). Among the 76 predicted ORFs, 7 ORFs and their deduced proteins show no homologies to database entries. The other predicted ORFs and their deduced proteins do exhibit such homologies and therefore play putative roles in nitrogen fixation (ORFs y4uJ to y4vB, y4vE, y4vN to y4vR, y4wK and y4wL), nodulation (ORFs y4yC and y4yH), transportation (ORFs y4tQ to y4uA, y4vF and y4wM), secretion of proteins or other biomolecules (ORFs y4yI and y4yO), transcriptional regulation/DNA binding (ORFs y4wC and y4xI), in amino acid metabolism or metabolism of amino acid derivatives (ORFs y4uB, y4uC, y4uF, y4wD, y4wE and y4xN to y4yA), degradation of xenobiotic compounds (ORFs y4vG to y4vI), in peptidolysis/proteolysis (ORFs y4wA and y4wB) or transposition (ORFs y4uE, y4uH and y4uI) (see Table 3). The

TABLE 3
List of the predicted functional ORFs and of fragments representing putative remnants of functional ORFs

| | | | | no. of | hom. | | | | | | |
|---|---|---|---|---|---|---|---|---|---|---|---|
| | func- | | position in | deduced | amino | hom. protein | | | | | |
| | tional | | plasmid | amino | acids | | length | accession | I/ | S/ | |
| ORF^{a} | name | st.^{b} | (base no.)^{c} | acids | (position) | name | (aa)^{d} | no.^{e} | %^{f} | %^{f} | note^{g} |
| y4aA | | −2/3 | 534696-000474 | 647 | 16-646 | Shc | 658 | X86552 | 78 | 88 | prob. squalene-hopene-cyclase; put. operon y4aABCD: |
| | | | | | | | | | | | inv. in synthesis of an isoprenoid compound |
| y4aB | | −3 | 000523-001776 | 417 | 6-415 | ORF1 | 414 | X80766 | 43 | 63 | put. flavoprotein oxidoreductase |
| y4aC | | −2 | 001776-002615 | 279 | 3-247 | Psy1 | 419 | X68017 | 34 | 50 | put. phytoene synthase |
| y4aD | | −1 | 002612-003490 | 292 | 10-195 | CrtI | 342 | L37405 | 33 | 51 | hyp. protein hom. to squalene and phytoene synthetases |
| fa1 | | −3 | 003487-004011 | | | | | | | | fragmentous character |
| y4aF | nolK | −3 | 005173-006117 | 314 | 9-310 | ORF14.8 | 321 | U46859 | 51 | 70 | put. NAD-dep. nucleotide sugar epimerase/dehydrogenase; |
| | | | | | | | | | | | NoeJKL/NodZ/NolK inv. in biosynthesis of fucose |
| | | | | | | | | | | | moiety of Nod factors |
| y4aG | noeH | −2 | 006126-007181 | 351 | 4-339 | RfbD | 348 | U24571 | 65 | 80 | put. GDP-D-mannose dehydratase |
| y4aH | nodZ | −1 | 007426-008394 | 322 | 3-254 | NodZ | 324 | L22756 | 69 | 83 | put. fucosyltransferase |
| y4aI | noeK | −3 | 008623-010047 | 474 | 5-471 | ORF5 | 483 | U47057 | 42 | 59 | put. phosphomannomutase |
| y4aJ | noeJ | +3 | 010110-011648 | 512 | 33-498 | XanB | 466 | M83231 | 50 | 65 | put. mannose-1-phosphate guanylyltransferase |
| y4aK | | +2 | 012125-012277 | 50 | | | | | | | hyp. 5.5 kd protein |
| y4aL | nodD1 | +2 | 012380-013348 | 322 | 1-322 | NodD1 | 322 | Y00059 | 98 | 99 | transcriptional regulator (LysR family); high similarity to |
| | | | | | 1-310 | NodD2 | 312 | this work | 68 | 84 | Y4xH(NodD2) |
| y4aM | | +3 | 013911-014342 | 143 | 7-132 | ORF3 | 127 | L13845 | 50 | 66 | put. DNA-binding protein; high similarity to Y4wC |
| | | | | | 1-143 | Y4wC | 143 | this work | 69 | 77 | |
| y4aN | | +1 | 01014488-014934 | 148 | 1-129 | ORF3 | 128 | X04833 | 41 | 56 | homologue located nearby the replicator region of pRiA4b |
| y4aO | | +3 | 015065-015643 | 192 | | | | | | | hyp. 21.8 kd protein; low similarity to Y4nF(<30% id.) |
| y4aP | mucR | +3 | 016161-016592 | 143 | 1-143 | MucR | 143 | L37353 | 89 | 95 | put. transcriptional regulator (Ros/MucR family); |
| | | | | | | | | | | | similarity to Y4pD; possibly inv. in regulation of |
| | | | | | | | | | | | exopolysaccharide synthesis |
| y4aQ | | −2 | 017016-017582 | 188 | 15-167 | No1265 | 266 | X74068 | 33 | 50 | hyp. 20.4 kd protein; similar to Y4hP, Y4jD, Y4qI |
| y4aR | | +2 | 017798-018121 | 107 | | | | | | | hyp. 12.1 kd protein |
| y4aS | | +1 | 018121-018666 | 181 | | | | | | | hyp. 20 kd protein |
| fa2 | | +3 | 018912-019664 | 250 | 126-250 | Tnp | 465 | U04047 | 38 | 51 | hyp. protein fragment |
| | | | | | 78-150 | Y4iG | 90 | this work | 93 | 97 | |
| | | | | | 3-266 | Y4bF | 457 | this work | 53 | 73 | |
| y4bA | | −2 | 019674-021758 | 694 | 1-393 | fo6 | 430 | this work | 89 | 95 | hyp. 78.7 kd protein; identical to Y4pH |
| | | | | | 406-532 | fo5 | 136 | this work | 83 | 94 | |
| | | | | | 532-694 | fo4 | 143 | this work | 77 | 83 | |
| y4bB | | −3 | 021748-022014 | 88 | 2-88 | Y4oL | 88 | this work | 63 | 69 | hyp. 9.7 kd protein precursoer; identical to Y4pI |
| y4bC | | −1 | 022034-022483 | 149 | 1-149 | Y4oM | 149 | this work | 79 | 88 | hyp. 16.8 kd protein; identical to Y4pJ |
| y4bD | | −2 | 022674-022943 | 89 | 20-89 | Y4oN | 70 | this work | 73 | 84 | hyp. 10.2 kd protein; identical to Y4pK |
| fb1 | | +2 | 022985-023659 | 224 | 36-224 | Y4bF | 457 | this work | 42 | 63 | hyp. protein fragment |
| y4bF | | +1 | 023953-025326 | 457 | 130-436 | Tnp | 465 | U04047 | 31 | 46 | put. transposase; |
| | | | | | 2-265 | Fa2 | 266 | this work | 53 | 73 | upstream of this ORF (23875-23987) 89% nt-id. to part |
| | | | | | 77-169 | Y4iG | 90 | this work | 51 | 72 | of origin of replication-region (R. meliloti, S66221) |
| | | | | | 285-457 | Fb1 | 188 | this work | 42 | 63 | |
| | | | | | 410-457 | Y4jM | 70 | this work | 75 | 79 | |
| y4bG | | +1 | 025870-026685 | 271 | | | | | | | hyp. 30 kd protein precurser |
| y4bH | | +1 | 028513-028788 | 91 | | | | | | | hyp. 9.6 kd integral membrane protein |
| y4bI | | +3 | 028860-029276 | 138 | 3-108 | HI1631 | 190 | U00085 | 41 | 61 | hyp. 15.3 kd protein precurser |
| y4bJ | | +1 | 029392-031284 | 630 | 429-564 | HtrA | 503 | L20127 | 40 | 53 | hyp. 67.9 kd integral membrane protein, distantly related |
| | | | | | | | | | | | to peptidase family S2C |
| y4bK | | +2 | 031625-032293 | 222 | 83-212 | ORF1 | 215 | D84146 | 25 | 45 | hyp. 24.3 kd protein |
| y4bL | | +1 | 032641-034191 | 516 | 7-515 | ORF1 | 558 | X79443 | 44 | 63 | identical to Y4kJ and Y4tB; similar to Fo3 and Fo7; put. |
| | | | | | 6-516 | Y4uI | 515 | this work | 48 | 66 | transpposase |
| y4bM | | +3 | 034188-034979 | 263 | 1-203 | ORF2 | 231 | X79443 | 45 | 62 | identical to Y4kI and Y4tA; put. insertion sequence ATP- |
| | | | | | 6-248 | Y4pL | 245 | this work | 55 | 73 | binding protein; similarity to Y4pL, Y4uH, also to |
| | | | | | 6-254 | Y4uH | 248 | this work | 48 | 68 | Y4sD/Y4nD/Y4iQ |
| | | | | | 1-263 | Y4iQ | 298 | this work | 31 | 56 | |
| y4bN | | +1 | 035278-036573 | 431 | | | | | | | hyp. 47.6 kd protein |
| y4bO | | +1 | 036646-038466 | 606 | | | | | | | hyp. 66.8 kd protein |
| y4cA | | −1 | 038576-042169 | 1197 | | | | | | | hyp. 137.7 kd protein; largest protein in pNGR234a |
| y4cB | | −3 | 042226-042522 | 98 | | | | | | | hyp. 10.2 kd integral membrane protein |
| y4cC | | −3 | 042556-044109 | 517 | | | | | | | hyp. 57.8 kd protein |
| y4cD | | −2 | 044106-046028 | 640 | | | | | | | hyp. 71.6 kd protein |
| y4cE | | −3 | 046486-047661 | 391 | | | | | | | hyp. 43.4 kd protein |
| y4cF | | −1 | 047687-048829 | 380 | | | | | | | hyp. 41.8 kd protein |
| y4cG | | +2 | 049361-050278 | 305 | 16-173 | Pin | 184 | K00676 | 50 | 68 | prob. DNA invertase “resolvase-type” |
| | | | | | 17-222 | Y41S | 183 | this work | 40 | 60 | |
| y4cH | | −2 | 050427-050636 | 69 | 4-65 | CspS | 70 | L23115 | 56 | 70 | prob. cold shock regulator |
| y4cI | | −2 | 053202-054416 | 404 | 1-397 | RepC | 405 | X04833 | 60 | 73 | put. replication protein C |
| y4cJ | | −3 | 054571-055551 | 326 | 1-317 | RepB | 319 | X89447 | 39 | 55 | put. replication protein B |
| y4cK | | −2 | 055608-056831 | 407 | 10-404 | RepA | 398 | X89447 | 58 | 73 | put. replication protein A |
| y4cL | traI | +2 | 057635-058261 | 208 | 1-206 | TraI | 212 | U43675 | 55 | 66 | prob. autoinducer synthetase (inv. in control of conjugal |
| | | | | | | | | | | | transfer) |
| y4cM | trbB | +3 | 058272-059249 | 325 | 3-325 | TrbB | 323 | U43675 | 80 | 88 | prob. conjugal transfer protein (PulE family) |
| | | | | | 1-115 | Y4oG | 125 | this work | 25 | 51 | |
| y4cN | trbC | +1 | 059239-059622 | 127 | 7-127 | TrbC | 134 | U43675 | 69 | 78 | prob. conjugal transfer protein (integral membrane prot.) |
| y4cO | trbD | +2 | 059615-059914 | 99 | 1-99 | TrbD | 99 | U43675 | 70 | 89 | prob. conjugal transfer protein (integral membrane prot.) |
| y4cP | trbEa | +3 | 059925-060374 | 149 | 1-136 | TrbE | 820 | U43675 | 80 | 91 | prob. conjugal transfer protein (hom. to 5′ part of trbE) |
| y4cQ | trbEb | +1 | 060394-062382 | 662 | 5-659 | TrbE | 820 | U43675 | 83 | 90 | prob. conjugal transfer protein (hom. to 3′ part of trbE) |
| y4dA | trbJ | +2 | 062354-063157 | 267 | 1-107 | TrbJ | 175 | U43675 | 60 | 69 | prob. conjugal transfer protein |
| | | | | | 194-267 | | | | 71 | 79 | |
| y4dB | trbK | +1 | 063154-063351 | 65 | 5-65 | TrbK | 75 | U43675 | 40 | 56 | prob. conjugal transfer protein precurser |
| y4dC | trbL | +3 | 063345-064520 | 391 | 3-387 | TrbL | 395 | U43675 | 74 | 85 | prob. conjugal transfer protein (integral membrane prot.) |
| y4dD | trbF | +2 | 064544-065206 | 220 | 1-220 | TrbF | 220 | U43675 | 80 | 90 | prob. conjugal transfer protein |
| y4dE | trbG | +1 | 065224-066036 | 270 | 6-270 | TrbG | 284 | U43675 | 74 | 84 | prob. conjugal transfer protein precursor |
| y4dF | trbH | +1 | 066040-066486 | 148 | 1-147 | TrbH | 159 | U43675 | 55 | 68 | prob. conjugal transfer protein precurser (with lipid anchor) |
| y4dG | trbI | +3 | 066498-067793 | 431 | 1-430 | TrbI | 433 | U43675 | 66 | 79 | prob. conjugal transfer protein (integral membrane prot.) |
| y4dH | traR | +2 | 068096-68806 | 236 | 7-236 | TraR | 234 | Z15003 | 28 | 45 | prob. transcriptional activator of conjugal transfer genes |
| | | | | | | | | | | | (LuxR family) |
| y4dI | traM | −1 | 068810-069133 | 107 | 8-101 | TraM | 102 | U43674 | 30 | 51 | prob. modulator of TraR/autoinducer-mediated activation |
| | | | | | | | | | | | of tra genes |
| y4dJ | | +3 | 069351-069584 | 77 | 1-67 | ORF | 84 | X16458 | 37 | 59 hyp. transcriptional regulator (PbsX family); low | |
| | | | | | | | | | | | similarity to N-terminus of Y4dL |
| y4dK | | −1 | 069629-069949 | 106 | | | | | | | hyp. 11.8 kd protein |
| fd1 | | −2 | 069936-070250 | (105) | (2-85) | ORFA | 400 | X67861 | 39 | 58 | put. transposase fragment |
| y4dL | | +1 | 070603-071193 | 196 | — | — | — | — | — | — | hyp. 21.8 kd protein; low similarity to Y4dJ |
| y4dM | | +2 | 071186-072415 | 409 | 1-357 | HipA | 440 | M61242 | 31 | 46 | hyp. 45.3 kd protein; homolog affects frequency of |
| | | | | | 3-405 | Y4mE | 420 | this work | 34 | 56 | persistence after inhibition of cell wall or DNA synthesis |
| y4dN | | +1 | 072787-072975 | 62 | — | — | — | — | — | — | hyp. 7 kd protein |
| y4dO | | −1 | 073550-073951 | 133 | 12-121 | ORF | 381 | D83536 | 43 | 57 | hyp. 14.9 kd (fragmentous?) protein; homology to intron |
| | | | | | | | | | | | protein of P. anserina continues in fr.-2 (73541-73467) |
| y4dP | | −1 | 074423-075025 | 200 | 1-48 | ORFR2 | 57 | U43674 | 72 | 89 | hyp. 21 kd protein; hom. to conjugal transfer region 1 |
| | | | | | 56-198 | ORFR3 | 154 | | 47 | 71 | |
| y4dQ | traB | −2 | 075042-076205 | 387 | 1-387 | TraB | 421 | U40389 | 61 | 72 | prob. conjugal transfer protein |
| y4dR | traF | −3 | 076195-076761 | 188 | 20-188 | TraF | 176 | U40389 | 55 | 73 | prob. conjugal transfer protein |
| y4dS | traA | −2 | 076758-080066 | 1102 | 1-1102 | TraA | 1100 | U43674 | 67 | 79 | prob. conjugal transfer protein (relaxase) |
| y4dT | traC | +3 | 080319-080627 | 102 | 1-102 | TraC | 98 | U40389 | 64 | 80 | prob. conjugal transfer protein |
| y4dU | traD | +1 | 080632-080847 | 71 | 1-71 | TraD | 71 | U43674 | 77 | 84 | prob. conjugal transfer protein |
| y4dV | traG | +2 | 080834-082756 | 640 | 1-631 | TraG | 658 | U40389 | 71 | 83 | prob. conjugal transfer protein |
| fd2 | | + | 083002-083293 | | | ORFL1 | 152 | U43674 | | | fragments hom. to ORFL1 (conjugal transfer region1); |
| | | | | | | | | | | | frameshifts: 83072 (1 > 3), 83161 (3 > 2) |
| y4dW | | +1 | 083305-083919 | 204 | | | | | | | hypothetical 22.9 kd protein |
| y4dX | | +1 | 083944-84522 | 192 | | | | | | | hypothetical 20.6 kd protein |
| y4eA | | −2 | 084570-084836 | 88 | | | | | | | hypothetical 9.9 kd protein |
| y4eB | | −3 | 084976-085290 | 104 | | | | | | | hypothetical 11.6 kd protein |
| fe1 | | − | 085829-088007 | | | MerA | 474 | X65467 | | | put. fragments; homology to mercuric reductase, put. |
| | | | | | | | | | | | frameshifts: 86592 (−1 < −3), 87288 (−3 < −2) |
| y4eC | | −2 | 088305-089228 | 307 | 14-306 | TraC-1 | 1061 | X59793 | 38 | 55 | hyp. 34.2 kd protein; hom. to 5′end. of traC-1 from |
| | | | | | | | | | | | plasmid RP4 |
| y4eD | | +1 | 091051-092178 | 375 | 51-136 | ORF145 | 145 | X52594 | 29 | 55 | put. phosphodiesterase; low homology to |
| | | | | | | | | | | | glycerophosphoryl-diester-phosphodiesterase |
| y4eE | | +1 | 092212-093288 | 358 | | | | | | | hyp. 38.5 kd protein |
| fe2 | | − | 093572-093969 | | | TnpA | | U14952 | | | fragments of put. transposase; put. frameshift: 93798 |
| | | | | | | | | | | | (2 < 3) |
| y4eF | | −1 | 093980-094735 | 251 | 2-236 | Int | 259 | U14952 | 37 | 53 | put. integrase/recombinase (“phage-type”); similar to |
| | | | | | 1-251 | Y4qK | 308 | this work | 92 | 94 | Y4rF (35% aa-id.); low similarity to Y4rABCDE |
| fe5 | | −1 | 094988-095188 | 66 | 1-66 | Fq6 | 66 | this work | 79 | 94 | put. defective integrase/recombinase |
| | | | | | 1-66 | Y4rC | 332 | this work | 41 | 55 | |
| fe3 | | − | 095343-096025 | | | Int | 259 | U14952 | | | fragments hom. to integrase; put. frameshift: 95559- |
| | | | | | | | | | | | 95671 (−2 < −1) |
| y4eH | nolL | −2 | 096093-097193 | 366 | 11-359 | NolL | 373 | U22899 | 63 | 77 | nodulation protein; hyp. acetyl transferase |
| y4eI | | −2 | 097914-098225 | 103 | | | | | | | hyp. 11.1 kd protein with transmembrane domain |
| fe6 | | +3 | 098358-098657 | 99 | 3-98 | AatB | 410 | L12149 | 40 | 55 | hyp. 10.3 kd protein fragment, hom. to C-terminal part of |
| | | | | | | | | | | | bacterial aminotransferases |
| y4eK | | +2 | 098675-099421 | 248 | 10-245 | Adh | 252 | U00084 | 37 | 53 | hyp. short chain type dehydrogenase/reductase |
| y4eL | | +3 | 099447-100193 | 248 | 1-244 | Gno | 256 | X80019 | 31 | 47 | hyp. short chain type dehydrogenase/reductase |
| fe4 | | + | 100270-101901 | | | IIvG | | M37337 | | | put. fragment; put. frameshifts: 100721 (1 > 2), 101728 |
| | | | | | | | | | | | (2 > 1) |
| fe7 | | −1 | 101585-102298 | 237 | 1-103 | Tnp | 398 | U08627 | 91 | 95 | put. truncated transposase-like protein; similar to Y4pO |
| y4eN | | −3 | 102625-102936 | 103 | | | | | | | hyp. 11.5 kd protein |
| y4eO | | −2 | 102933-103598 | 221 | | | | | | | hyp. 24.5 kd protein |
| y4fA | | −1 | 103805-106342 | 845 | 327-837 | McpA | 657 | X66502 | 41 | 59 | prob. methyl-accepting chemotaxis protein |
| | | | | | 7-845 | Y4sI | 756 | this work | 29 | 49 | |
| y4fB | | +3 | 106620-108614 | 664 | | | | | | | hyp. 73.7 kd protein |
| y4fC | | +3 | 109884-110618 | 244 | 10-163 | DszA | 453 | L37363 | 38 | 52 | hyp. (fragmentous?) monooxygenase; extended homology |
| | | | | | | | | | | | to DszA in fr.2: 110372 to 110506. |
| y4fD | | −1 | 110516-111178 | 220 | | | | | | | hyp. 24.6 kd integral membrane protein |
| y4fE | | −2 | 111195-111677 | 160 | | | | | | | hyp. 17.2 kd protein precursor |
| y4fF | | −1 | 111803-112348 | 181 | | | | | | | hyp. 19.5 kd protein |
| y4fG | | −2 | 112338-112727 | 129 | | | | | | | hyp. 14.5 kd protein |
| y4fH | | −1 | 113474-113782 | 102 | | | | | | | hyp. 11.6 kd protein |
| ff1 | | −3 | 113779-114114 | 111 | 61-97 | DppF | 330 | L08399 | 56 | 86 | hyp. protein fragment, similar to central region of |
| | | | | | | | | | | | oligo/di-peptide ABC transporter ATP-binding proteins |
| y4fJ | | −2 | 114348-115379 | 343 | 3-210 | RopA | 318 | M69214 | 53 | 66 | put. outer membrane protein (porin) precurser |
| y4fK | | −2 | 116112-117395 | 427 | 275-421 | XylS2 | 157 | L02642 | 31 | 53 | put. transcriptional regulator (AraC family) |
| y4fL | | −3 | 117385-118212 | 275 | 9-243 | ORF | 268 | U39059 | 32 | 46 | hyp. 29.1 kd integral membrane protein, belongs to the |
| | | | | | | | | | | | inositol monophosphatase family |
| y4fM | | −2 | 118209-119144 | 311 | | | | | | | hyp. 35.5 kd protein |
| y4fN | | −2 | 119145-120854 | 569 | 11-513 | CysU | 550 | U32807 | 23 | 45 | prob. ABC transporter permease protein; put. part of |
| | | | | | | | | | | | binding-protein-dependent transport system Y4fNOP |
| y4fO | | −1 | 120851-121870 | 339 | 12-247 | PotA | 381 | U32759 | 49 | 68 | prob. ABC transporter ATP-binding protein |
| y4fP | | −1 | 121883-122959 | 358 | 32-293 | SufA | 338 | M33815 | 23 | 42 | prob. ABC transporter periplasmic binding protein precurser |
| y4fQ | | +1 | 123016-124194 | 392 | 9-234 | NagC | 406 | X14135 | 25 | 46 | hyp. 41.6 kd protein; belongs to “ROK” family |
| | | | | | | | | | | | (transcriptional regulator or transferase) |
| y4fR | | +1 | 124813-126453 | 546 | 88-539 | IpaH | 532 | M32063 | 38 | 54 | hyp. 60.5 kd protein, hom. to invasion plasmid antigen H |
| y4gA | | −1 | 126806-127369 | 187 | | | | | | | hyp. 20.9 kd protein; low similarity to Y4rE |
| y4gB | | −2 | 127485-127904 | 139 | | | | | | | hyp. 16.1 kd protein |
| y4gC | | −1 | 127901-128479 | 192 | 1-178 | ORF2 | 415 | L34580 | 43 | 58 | put. integrase/recombinase (“phage-type) |
| y4gD | | −1 | 128579-128857 | 92 | | | | | | | hyp. 10.5 kd protein |
| y4gE | | +2 | 131021-131767 | 248 | | | | | | | hyp. (fragmentous?) 27.7 kd protein; |
| | | | | | | | | | | | put. frameshifts: 131532 (2 > 1), 131892 (1 > 2) |
| y4gF | | +2 | 132734-133786 | 350 | 4-345 | RhsB | 353 | U51197 | 65 | 74 | prob. dTDP-D-glucose-4,6-dehydratase (Y4gFGH inv. in |
| | | | | | | | | | | | dTDP-L-rhamnose biosynthesis) |
| y4gG | | +2 | 133790-134680 | 296 | 1-290 | RhsD | 288 | U51197 | 48 | 66 | prob. dTDP-4-dehydrorhamnose reductase |
| y4gH | | +1 | 134677-135537 | 286 | 2-285 | RfbA | 293 | U09876 | 65 | 82 | prob. glucose-1-phosphate thymidylyltransferase |
| y4gI | | +3 | 135534-138263 | 909 | 276-894 | RfbC | 1275 | U36795 | 38 | 55 | hyp. 102.8 kd protein (homolog is involved in O-antigen |
| | | | | | | | | | | | biosynthesis) |
| y4gJ | | −1 | 138737-139315 | 192 | | | | | | | hyp. 21.1 kd protein |
| y4gK | fixF | +3 | 142026-143234 | 402 | 114-184 | KpsS | 389 | X74567 | 26 | 54 | necessary for functional nitrogen fixation, hom. to |
| | | | | | 203-362 | | | | 30 | 53 | capsule polysaccharide export protein |
| y4gL | | −3 | 143473-144060 | 195 | 24-192 | RhsC | 188 | U51197 | 53 | 65 | prob. dTDP-4-dehydrorhamnose-3,5-epimerase (inv. in |
| | | | | | | | | | | | dTDP-L-rhamnose biosynthesis) |
| y4gM | | −2 | 144147-145907 | 586 | 26-581 | MsbA | 582 | Z11796 | 32 | 56 | prob. ABC transporter ATP-binding protein |
| y4gN | | +2 | 146075-147226 | 383 | 52-297 | VirA | 304 | L08012 | 29 | 46 | hyp. 45 kd protein |
| y4hA | | −1 | 147455-148558 | 367 | 7-362 | ChaA | 366 | L28709 | 34 | 58 | put. ionic transporter |
| y4hB | noeE | −3 | 148819-150078 | 419 | 3-138 | F42G9.8 | 359 | U00051 | 32 | 49 | nodulation protein (put. sulfate transferase) |
| | | | | | 197-289 | | | | 25 | 50 | |
| y4hC | noeG | −3 | 151051-151782 | 243 | 18-229 | u0002kb | 243 | U00024 | 27 | 42 | nodulation protein (unknown function) |
| y4hD | nolO | −1 | 151979-154021 | 680 | 1-126 | NolN | 127 | L22756 | 70 | 83 | inv. in O-carbamoylation of Nod factors (sim. to NodU) |
| | | | | | 140-496 | NolO | 358 | | 78 | 89 | |
| y4hE | nodJ | −3 | 154120-154908 | 262 | 5-261 | NodJ | 262 | J03685 | 69 | 84 | prob. ABC transporter permease (see nodI) |
| y4hF | nodI | −3 | 154912-155943 | 343 | 15-343 | NodI | 339 | X55795 | 69 | 85 | prob. ABC transporter ATP-binding transport protein; |
| | | | | | | | | | | | put. role: together with NodJ export of modified beta-1,4- |
| | | | | | | | | | | | N-glucosamine oligosaccharides |
| y4hG | nodC | −1 | 156095-157336 | 413 | 1-413 | NodC | 413 | X73362 | 99 | 100 | N-acetylglucosaminyltransferase |
| y4hH | nodE | −3 | 157351-157998 | 215 | 1-215 | NodB | 214 | X73362 | 99 | 99 | chitooligosaccharide deacytelase |
| y4hI | nodA | −2 | 157995-158585 | 196 | 1-196 | NodA | 196 | X73362 | 100 | 100 | N-acyltransferase; nodABC involved in synthesis of |
| | | | | | | | | | | | backbone of modified N-acylated glucosamine |
| | | | | | | | | | | | oligosaccharides |
| y4hJ | | −1 | 158993-159775 | 260 | 59-240 | ORF2 | 251 | L133618 | 68 | 81 | hom. to part of coproporphyrinogen III oxidase (lacks C- |
| | | | | | | | | | | | terminus and conserved N-term. domain) |
| y4hK | | +3 | 160722-161465 | 247 | | | | | | | hyp. 25.4 kd integral membrane protein |
| y4hL | | +1 | 161569-161826 | 85 | | | | | | | hyp. 9.6 kd protein |
| y4hM | | +1 | 163042-164253 | 403 | 53-169 | Gfor | 439 | M97379 | 31 | 54 | hyp. 43.9 kd protein (partially hom. to glucose-fructose |
| | | | | | | | | | | | oxidoreductase) |
| y4hN | | +2 | 164600-165034 | 144 | 10-144 | ORFA | 135 | X84099 | 38 | 53 | hyp. 16 kd protein; partially hom. to Y4jB and Y4rG |
| y4hO | | +1 | 165037-165384 | 115 | 1-115 | ORF140 | 140 | X74068 | 100 | 100 | hyp. 12.8 kd protein |
| | | | | | 1-115 | ORFC | 144 | X84099 | 54 | 69 | |
| | | | | | 1-115 | Y4jC | 117 | this work | 36 | 62 | |
| y4hP | | +1 | 165430-167088 | 552 | 1-215 | no1265 | 266 | X74068 | 97 | 97 | hyp. 61.7 kd protein; similar to Y4aQ, Y4jD and Y4qI |
| | | | | | 80-328 | ORF2 | 258 | M10204 | 67 | 79 | |
| | | | | | 362-492 | ORF3 | 163 | M10204 | 47 | 61 | |
| y4hQ | | +3 | 167091-167675 | 194 | 5-185 | ORF3 | 237 | X51418 | 35 | 53 | hyp. 21.7 kd protein |
| | | | | | 1-52 | ORF91 | >91 | X74068 | 96 | 98 | |
| y4hR | | −3 | 167710-167934 | 74 | | | | | | | |
| fi1 | | − | 168208-168300 | | | | | | | | hyp. transposase fragment similar to R. meliloti |
| | | | | | | | | | | | ISRm2011-2 |
| fi2 | | +1 | 168430-168792 | 120 | 1-130 | Y4iO | 252 | this work | 78 | 87 | put. defective transposase (homologous to N-terminal |
| | | | | | 1-108 | Y4rJ | 396 | this work | 74 | 87 | parts of Y4iO and Y4rJ) |
| fi3 | | +2 | 168798-169190 | 130 | 1-109 | ORF1A | 317 | M33159 | 37 | 55 | put. defective transposase (hom. to C-terminal parts of |
| | | | | | 1-130 | Y4iO | 252 | this work | 78 | 87 | Y4iO and Y4rJ); additionally weak homology to |
| | | | | | 1-130 | Y4rJ | 396 | this work | 76 | 84 | Y4pF/Y4sB and Y4qE (<30% identity) |
| y4iR | | −3 | 169231-169716 | 161 | 15-145 | PsiB | 134 | L26581 | 55 | 74 | hyp. protein (homolog located in a polysaccharide |
| | | | | | | | | | | | biosynthesis inhibition operon |
| y4iC | | −2 | 169929-110621 | 230 | 58-123 | ORF | 161 | Z73419 | 41 | 54 | hyp. 25.8 kd protein (ORF = MTCY373.06) |
| y4iD | | −3 | 170563-172551 | 662 | 137-342 | ORF | 495 | Z73101 | 40 | 59 | prob. monooxygenase (ORF = MTCY31.20) |
| | | | | | 418-605 | | | | 28 | 51 | |
| y4iE | | +3 | 173295-173702 | 135 | 1-135 | Y4rL | 155 | this work | 33 | 52 | hyp. 15.4 kd (fragmentous?) protein; similar to Y4zA |
| y4iF | | −3 | 174211-175128 | 305 | | | | | | | hyp. 34.1 kd protein |
| y4iG | | −2 | 175590-175862 | 90 | 1-73 | Y4aT | 266 | this work | 93 | 97 | hyp. 10.5 kd (fragmentous?) protein |
| | | | | | 1-73 | Y4bF | 457 | this work | 60 | 76 | |
| y4iH | | +2 | 176045-176764 | 239 | 1-236 | Y4jT | 336 | this work | 32 | 53 | hyp. 26 kd protein precurser |
| y4iI | | −2 | 176937-179048 | 703 | | | | | | | hyp. 76.2 kd integral membrane protein |
| y4iJ | | −2 | 179097-180887 | 596 | | | | | | | hyp. 65.5 kd protein; ;ow similarity to Y4iM |
| y4iK | | −3 | 180940-181638 | 232 | | | | | | | hyp. 26.8 kd protein; y4iKL: two fragments of one gene?; |
| | | | | | | | | | | | put. frameshift; 181884 (−3 < −2) |
| y4iL | | −2 | 181692-182990 | 432 | | | | | | | hyp. 47.8 kd protein; y4iKL two fragments of one gene?; |
| | | | | | | | | | | | put. frameshift: 181884 (−3 < −2) |
| y4iM | | −2 | 183036-184334 | 432 | | | | | | | hyp. 47.1 kd protein; low similarity to Y4iJ; y4iMN two |
| | | | | | | | | | | | fragments of one gene?; |
| | | | | | | | | | | | put. frameshift: 184440 (−2 < −3) |
| y4iN | | −3 | 184309-184935 | 208 | | | | | | | hyp. 22.1 kd protein precurser; y4iMN two fragments of |
| | | | | | | | | | | | one gene?; put. frameshift: 184440 (−2 < −3) |
| y4iO | | −2 | 185679-186437 | 252 | 17-243 | Tnp | 334 | Z48244 | 29 | 46 | put. transposase or transposase-fragment; additionally |
| | | | | | 1-121 | Fi2 | 120 | this work | 67 | 79 | weak homology to Y4pF/Y4sB and Y4qE (<30% identity) |
| | | | | | 123-252 | Fi3 | 130 | this work | 78 | 87 | |
| | | | | | 1-252 | Y4rJ | 396 | this work | 71 | 83 | |
| y4iP | | −1 | 186437-186832 | 131 | 4-163 | Y4rJ | 396 | this work | 58 | 80 | hyp. 14.4 kd protein or fragment hom. to N-term. of Y4rJ |
| y4iQ | | −3 | 187162-188058 | 298 | 13-253 | IstB | 265 | U38187 | 34 | 56 | identical to Y4nD/Y4sD; put insertion sequence ATP- |
| | | | | | 8-283 | Y4bM | 263 | this work | 31 | 56 | binding protein; similarity to Y4bM/Y4kI/Y4tA, Y4uH |
| | | | | | 5-265 | Y4uH | 248 | this work | 31 | 52 | and weakly to Y4pL |
| y4jA | | −2 | 188055-189569 | 504 | 147-494 | IstA | 507 | U38187 | 25 | 42 | identical to y4nE/y4sE; hyp. 57.2 kd protein with low |
| | | | | | 395-504 | Fz4 | 110 | this work | 72 | 85 | similarity to IS21/IS408/IS1162 transposases |
| y4jB | | +3 | 190248-190706 | 152 | 24-79 | ORF1 | 130 | U19148 | 46 | 69 | hyp. 16.7 kd protein; partially similarity to Y4hN; low |
| | | | | | | | | | | | similarity to Y4rG |
| y4jC | | +2 | 190703-191056 | 117 | 1-115 | ORFC | 144 | X84099 | 39 | 58 | hyp. 13.1 kd protein; see y4hO |
| | | | | | 1-117 | Y4hO | 115 | this work | 36 | 62 | |
| y4jD | | +2 | 191105-192640 | 511 | 89-298 | ORF2 | 258 | M10204 | 36 | 53 | hyp. 56.7 kd protein; see y4hP |
| | | | | | 340-453 | ORF3 | 163 | M10204 | 28 | 49 | |
| | | | | | 18-183 | no1265 | 266 | X74068 | 32 | 48 | |
| y4jE | | +1 | 192637-193458 | 273 | | | | | | | hypothetical (fragmentous?) 29.4 kd integral membrane |
| | | | | | | | | | | | protein; put. frameshift: 192996 (1 > 2; end of shifted ORF |
| | | | | | | | | | | | at 193183) |
| y4jF | | −1 | 194771-196330 | 519 | | | | | | | hyp. 55.4 kd integral membrane protein |
| y4jG | | −3 | 196333-196821 | 162 | | | | | | | hyp. 17.9 kd transmembrane protein |
| y4jH | | −2 | 196818-197435 | 205 | | | | | | | hyp. 23 kd protein |
| y4jI | | −3 | 197428-197820 | 130 | | | | | | | hyp. 13.6 kd protein |
| y4jJ | | +1 | 198043-198300 | 85 | 1-85 | StbC | 103 | L48985 | 67 | 76 | put. plasmid stability protein |
| y4jK | | +3 | 198297-198719 | 140 | 1-138 | StbB | 139 | L48985 | 57 | 76 | put. plasmid stability protein |
| y4jL | | +3 | 199002-199664 | 220 | | | | | | | hyp. 25.1 kd protein |
| y4jM | | −2 | 199746-199958 | 70 | 11-58 | Y4bF | 457 | this work | 75 | 79 | hyp. 8 kd protein or protein fragment |
| | | | | | 15-58 | fb1 | 188 | this work | 50 | 64 | |
| y4jN | | −3 | 199975-200415 | 146 | | | | | | | hyp. 16.3 kd protein |
| y4jO | | −3 | 201514-202479 | 321 | | | | | | | hyp. 36.1 kd protein; y4jOP; two fragments of one gene?, |
| | | | | | | | | | | | put. frameshift: 202550 (−3 < −1) |
| y4jP | | −1 | 202406-203194 | 262 | | | | | | | hyp. 29.5 kd protein; y4jOP: two fragments of one gene?, |
| | | | | | | | | | | | put. frameshift: 202550 (−3 < −1) |
| y4jQ | | +2 | 203729-206848 | 1039 | | | | | | | hyp. 115.9 kd protein |
| y4jR | | +1 | 206860-207315 | 151 | | | | | | | hyp. 17.3 kd protein |
| y4jS | | +1 | 207316-208557 | 413 | | | | | | | hyp. 44.8 kd protein |
| y4jT | | −1 | 208877-209887 | 336 | 17-283 | Y4iH | 239 | this work | 32 | 53 | hyp. 36.4 kd protein precurser |
| y4kA | | −3 | 209917-210885 | 322 | | | | | | | hyp. 36.7 kd protein |
| y4kB | | +1 | 211663-212088 | 141 | | | | | | | hyp. 15.2 kd integral membrane protein |
| fk2 | | −1 | 212111-212479 | 122 | 58-116 | ORF14 | 104 | X00493 | 59 | 76 | hyp. fragment; sim. to Y4hP, Y4jD and Y4qI; additional |
| | | | | | | | | | | | homology to ORF14 in fr. +3/+2: 212331-212509 |
| y4kD | | −1 | 212750-214399 | 549 | | | | | | | hyp. 60.4 kd protein |
| y4kE | | −1 | 214412-215455 | 347 | | | | | | | hyp. 38 kd protein; y4kEF: two fragments of one gene?, |
| | | | | | | | | | | | put. frameshift: 215616 (−1 < −2) |
| y4kF | | −2 | 215439-216743 | 434 | | | | | | | hyp. 47.4 kd protein; y4kEF: two fragments of one |
| | | | | | | | | | | | gene?, put. frameshift: 215616 (−1 < −2) |
| y4kG | | −2 | 216855-217064 | 69 | | | | | | | hyp. 7.7 kd protein |
| y4kH | | −3 | 217105-217488 | 127 | | | | | | | hyp. 14.1 kd protein |
| y4kI | | −1 | 217670-218461 | 263 | — | — | — | — | — | — | see y4bM |
| y4kJ | | −3 | 218458-220008 | 516 | — | — | — | — | — | — | see y4bL |
| y4kK | | −1 | 220103-221041 | 312 | | | | | | | hyp. 34.9 kd protein |
| y4kL | | −2 | 221049-222041 | 330 | 101-296 | ORF300 | 300 | U23723 | 39 | 56 | hyp. 37.6 kd AAA-family ATPase protein |
| y4kM | | +2 | 222641-222994 | 117 | | | | | | | hyp. 13.1 kd protein |
| y4kN | | +2 | 223115-223537 | 140 | | | | | | | hyp. 15.7 kd protein |
| y4kO | | +2 | 223970-224218 | 82 | | | | | | | hyp. 9.2 kd protein |
| y4kP | | +1 | 224215-224505 | 96 | | | | | | | hyp. 11 kd protein |
| y4kQ | | −2 | 224898-225326 | 142 | | | | | | | hyp. (fragmentous?) 15.3 kd protein; homology to hipO |
| | | | | | | | | | | | fragments on the complementary strand |
| fk1 | | +3 | 225094-225473 | | | | | Z36940 | | | fragments hom. to HipO |
| y4kR | | −3 | 225535-225666 | 43 | 1-36 | ORF6 | 347 | M87280 | 55 | 66 | hyp. 4.8 kd (fragmentous?) protein (smallest ORF |
| | | | | | | | | | | | predicted to be a protein); hom. to N-term. of protein in |
| | | | | | | | | | | | crtE-crtX intergenic region |
| y4kS | | −3 | 225751-226656 | 301 | 1-301 | ORF8 | 300 | U12678 | 93 | 94 | hyp. 33.2 kd protein |
| y4kT | | −2 | 226653-228203 | 516 | 1-516 | ORF7 | 516 | U12678 | 93 | 94 | hyp. 55.1 kd protein |
| y4kU | | −3 | 228514-229512 | 332 | 1-332 | ORF6 | 332 | U12678 | 90 | 94 | prob. geranyltranstransferase |
| y4kV | | −3 | 229666-231009 | 447 | 92-447 | CYP117 | 356 | U12678 | 89 | 94 | cytochrome P-450 BJ-4 homolog |
| y4lA | | −2 | 231009-231845 | 278 | 1-274 | ORF4 | 275 | U12678 | 83 | 87 | short-chain type dehydrogenase/reductase |
| y4lB | | −3 | 231832-232140 | 102 | 1-58 | ORF3 | 94 | U12678 | 93 | 98 | put. P450-system 3Fe-3S ferredoxin |
| y4lC | | −2 | 232170-233573 | 467 | 48-428 | CYP114 | 382 | U12678 | 90 | 93 | cytochrome P-450 BJ-3 homolog |
| y4lD | | −1 | 233666-234868 | 400 | 3-400 | CYP112 | 401 | U12678 | 92 | 95 | cytochrome P-450 BJ-1 homolog |
| fl3 | | −2 | 235704-235904 | 66 | 2-54 | ORF8 | >207 | X66124 | 60 | 71 | hyp. 7.6 kd protein fragment, homology to ORF8 |
| | | | | | | | | | | | fragments also upstream of fl3 up to 236048 |
| fl1 | | − | 236796-237416 | | | | | Z36981 | | | homology to hupK/hupJ fragments (fr. −3/−2) |
| y4lF | | +1 | 237508-238479 | 323 | | | | | | | hyp. 36.1 kd protein |
| y4lG | | +2 | 238490-238975 | 161 | | | | | | | hyp. 17.4 kd protein |
| y4lH | | −2 | 238959-239537 | 192 | 3-184 | Fic | 200 | M28363 | 34 | 51 | hyp. 22.4 kd protein; hom. to cell filamentation/division |
| | | | | | | | | | | | protein |
| y4lI | | −2 | 239541-239750 | 69 | | | | | | | hyp. 7.3 kd protein |
| y4lJ | | −3 | 240358-240861 | 167 | | | | | | | hyp. 18.1 kd protein |
| fl2 | | − | 240920-241040 | | | | | X65471 | | | fragments fo transposase (ISRm4) |
| y4lK | | +1 | 241207-241605 | 132 | | | | | | | hyp. 14.3 kd protein |
| y4lL | | −2 | 241845-244328 | 827 | 118-816 | SLR0359 | 1244 | D63999 | 33 | 50 | hyp. 91.8 kd protein (member of E. coli |
| | | | | | | | | | | | YegE/YhdA/YhjK/YjcC family) |
| fl4 | | +1 | 244540-244851 | 103 | 19-103 | TnpA | 990 | L14931 | 39 | 51 | put. truncated transposase; hom. to N-term. of TnpA |
| | | | | | 28-81 | F15 | 112 | this work | 94 | 98 | (transposon Tn163); strong similarity to C-terminus of F15 |
| y4lN | | +3 | 244848-245330 | 160 | | | | | | | hyp. 18.1 kd protein |
| y4lO | | −3 | 247156-247938 | 260 | 11-216 | AvrRxv | 373 | L20423 | 36 | 50 | hyp. 29.1 kd protein; hom. to avirulence protein; put. |
| | | | | | | | | | | | frameshift according to homolog: 247230-247293 (−2 < −3); |
| | | | | | | | | | | | end of shifted frame: 246960 |
| fl5 | | +1 | 248290-248628 | 112 | 59-112 | F14 | 103 | this work | 94 | 98 | hyp. protein fragment; strong similarity to part of F14 |
| fl6 | | +3 | 248814-249680 | 288 | 8-286 | Tnp | 988 | M97297 | 27 | 49 | put. fragmentous transposase; homologous to C-term. of |
| | | | | | | | | | | | transposase (Tn1546) |
| y4lR | | +3 | 249696-251264 | 522 | | | | | | | hyp. 56.8 kd protein |
| y4lS | | +1 | 251407-251958 | 183 | 3-176 | PaeR7IN | 195 | S78872 | 42 | 56 | put. integrase/recombinase (“resolvase-type”) |
| | | | | | 4-181 | Y4cG | 305 | this work | 40 | 60 | |
| y4mA | | +3 | 251955-252380 | 141 | | | | | | | hyp. 15.8 kd protein |
| fm1 | | − | 254694-254920 | | | | | | | | fragments hom. to xylitol-dehydrogenase |
| y4mB | | +3 | 255450-256139 | 229 | 59-229 | ORF4 | 212 | X13583 | 33 | 53 | hyp. 24.6 kd outer membrane protein precurser |
| y4mC | | +2 | 256811-257524 | 237 | | | | | | | hyp. 26.2 kd protein precurser |
| y4mD | | −1 | 258065-258334 | 89 | | | | | | | hyp. 10 kd protein |
| y4mE | | −3 | 259030-260292 | 420 | 6-334 | HipA | 440 | M61242 | 32 | 46 | hyp. 45.7 kd protein |
| | | | | 2-417 | Y4dM | 409 | this work | 34 | 56 | | |
| y4mF | | −2 | 260289-260519 | 76 | 11-47 | ORF3 | 90 | X06090 | 37 | 70 | hyp. transcriptional regulator; very low similarity to |
| | | | | | | | | | | | phage repressor proteins |
| y4mG | | +3 | 261174-261395 | 73 | | | | | | | hyp. 7.8 kd protein |
| y4mH | | −2 | 261747-262640 | 297 | | | | | | | hyp. 33.9 kd protein |
| y4mI | | −2 | 262698-263672 | 324 | 11-252 | RbsB | 296 | M13169 | 25 | 49 | prob. ABC transporter periplasmic binding protein |
| | | | | | | | | | | | precurser (transport system Y4mIJK probably transports a sugar) |
| y4mJ | | −3 | 263716-264717 | 333 | 12-323 | RbsC | 321 | M13169 | 34 | 55 | prob. ABC transporter permease |
| y4mK | | −2 | 264714-266207 | 497 | 8-489 | RbsA | 501 | M13169 | 34 | 55 | prob. ABC transporter ATP-binding protein |
| y4mL | | −3 | 266218-267477 | 419 | 1-418 | HI1029 | 425 | U00079 | 33 | 58 | put. permease (E. coli YiaN/YgiK family) |
| y4mM | | −2 | 267474-269099 | 541 | 38-360 | HI1028 | 328 | U32729 | 33 | 54 | put. permease (SBR family 7) |
| y4mN | | −1 | 269096-270133 | 345 | 37-340 | Tkt | 655 | U09256 | 36 | 54 | hyp. transketolase family protein (fragmentous?); hom. to |
| | | | | | | | | | | | C-term. of transketolases |
| y4mO | | −3 | 270130-270969 | 279 | 9-270 | Tkt | 655 | U09256 | 36 | 52 | hyp. transketolase family protein (fragmentous?); hom. to |
| | | | | | | | | | | | N-term. of transketolases |
| y4mP | | −3 | 271000-271761 | 253 | 4-249 | F09E10.3 | 255 | U41749 | 41 | 60 | put. short-chain type dehydrogenase/reductase |
| y4mQ | | +1 | 271909-272805 | 298 | 1-289 | PerR | 297 | U57080 | 48 | 65 | hyp. transcriptional regulator (LysR family) |
| y4nA | | −2 | 273204-275384 | 726 | 45-302 | ORF | 690 | D14005 | 21 | 36 | prob. peptidase; very low similarity to Y4qF and Y4sO |
| | | | | | 365-718 | | | | 38 | 54 | (<25% identity) |
| y4nB | nodU | −3 | 276451-278127 | 558 | 1-558 | NodU | 558 | X89965 | 100 | 100 | inv. in 6-O-carbamoylation of Nod factors; similar to Y4hD |
| y4nC | nodS | −1 | 278144-278794 | 216 | 1-216 | NodS | 216 | J03686 | 100 | 100 | methyltransferase inv. in Nod-factor synthesis |
| y4nD | | −3 | 280453-281349 | 298 | — | — | — | — | — | — | see Y4iQ |
| y4nE | | −2 | 281346-282860 | 504 | — | — | — | — | — | — | see Y4jA |
| fn1 | | + | 283238-283467 | | | | 241 | M26938 | | | hom. to virG fragments; similar to fq3 |
| y4nF | | +3 | 283809-284501 | 230 | | | | | | | hyp. 25.4 kd protein precurser; low similarity to Y4aO |
| | | | | | | | | | | | (<30% id.) |
| fn2 | | − | 284752-284923 | | | | | X79443 | | | fragments hom. to ORF2 (IS-ATP-binding protein) from |
| | | | | | | | | | | | IS1162 |
| y4nG | | +2 | 285407-286597 | 396 | 53-365 | ORF4 | 333 | U08223 | 31 | 47 | put. NAD-dep. nucleotide sugar epimerase/dehydrogenase |
| y4nH | | +1 | 286594-286947 | 117 | 5-113 | MvrC | 110 | M62732 | 30 | 47 | hyp. 12.3 kd integral membrane protein (some similarity |
| | | | | | | | | | | | to ethidium bromide resistance proteins) |
| y4nI | | +2 | 286964-287326 | 120 | | | | | | | hyp. 13 kd transmembrane protein |
| y4nJ | | +1 | 287335-288852 | 505 | 80-266 | BetA | 548 | U39940 | 29 | 44 | hyp. GMC-type oxidoreductase |
| | | | | | 343-468 | | | | 32 | 45 | |
| y4nK | | −2 | 288906-290894 | 662 | | | | | | | hyp. integral membrane protein |
| y4nL | | −3 | 290914-291984 | 356 | 14-345 | ORF6 | 328 | U47057 | 26 | 45 | put. NAD-dep. nucleotide sugar epimerase/dehydrogenase |
| y4nM | | −3 | 292003-293553 | 516 | 226-514 | NoeC | 307 | L18897 | 30 | 52 | put. permease |
| y4oA | | −3 | 294502-296283 | 593 | 328-494 | MccB | 350 | X57583 | 29 | 41 | hyp. 65.2 kd protein; homolog inv. in production of the |
| | | | | | 4-590 | Y4qC | 583 | this work | 30 | 50 | translation inhibitor microcin C7 |
| y4oB | | +1 | 296572-296961 | 129 | | | | | | | hyp. 14.7 kd protein |
| y4oC | | +1 | 296965-297657 | 230 | | | | | | | hyp. 26 kd protein |
| y4oD | | −1 | 297746-298390 | 214 | | | | | | | hyp. 23.5 kd protein |
| y4oE | | −3 | 298939-299148 | 69 | | | | | | | hyp. 7.4 kd protein |
| fo1 | | −2 | 299145-299588 | 147 | | | | | | | fo1 and fo2: two fragments of one put. gene; put. |
| | | | | | | | | | | | frameshift: 299664 (−2 < −3) |
| fo2 | | −3 | 299578-299955 | 125 | 25-109 | ORF11 | 344 | X53264 | 37 | 63 | homology to 5′part of ORF11; |
| | | | | | 1-123 | Y4cM | 325 | this work | 25 | 51 | fo1 and fo2: two fragments of one putative gene; put. |
| | | | | | | | | | | | frameshift: 299664 (−2 < −3) |
| fo3 | | +3 | 300015-300815 | 267 | 15-252 | Tnp | 518 | L09108 | 40 | 59 | fo3 and fo7: transposase-like protein interrupted by |
| | | | | | | | | | | | NGRIS-6 |
| fo4 | | −2 | 300828-301259 | 143 | 1-143 | Y4bA | 694 | this work | 77 | 83 | hyp. fragment; fo4/5/6: fragments of one gene similar to |
| | | | | | | | | | | | Y4bA/Y4pH |
| fo5 | | −1 | 301274-301684 | 136 | 1-127 | Y4bA | 694 | this work | 83 | 94 | hyp. fragment; fo4/5/6: fragments of one gene |
| fo6 | | −2 | 301608-302900 | 430 | 1-393 | Y4bA | 694 | this work | 89 | 95 | hyp. fragment; fo4/5/6: fragments of one gene |
| y4oL | | −3 | 302890-303156 | 88 | 1-88 | Y4bB | 98 | this work | 63 | 69 | hyp. 9.6 kd protein |
| y4oM | | −1 | 303179-303628 | 149 | 1-149 | Y4bC | 149 | this work | 79 | 88 | hyp. 16.8 kd protein |
| y4oN | | −2 | 303810-304022 | 70 | 1-70 | Y4bD | 89 | this work | 73 | 84 | hyp. 8.1 kd protein |
| fo7 | | +2 | 304118-304453 | 111 | 4-103 | Tnp | 518 | L09108 | 40 | 59 | fo3 and fo7: transposase-like protein interrupted by |
| | | | | | | | | | | | NGRIS-6 |
| y4oP | | +1 | 304861-306156 | 431 | 47-429 | u1756v | 469 | U15180 | 27 | 42 | prob. ABC transporter binding protein (Y4oPQRS: sugar- |
| | | | | | | | | | | | like transport system) |
| y4oQ | | +2 | 306236-307165 | 309 | 31-301 | MalF | 310 | U15180 | 35 | 56 | prob. ABC transporter permease protein |
| y4oR | | +2 | 307178-308011 | 277 | 12-277 | MalG | 296 | U15180 | 30 | 52 | prob. ABC transporter permease protein |
| y4oS | | +1 | 308008-309123 | 371 | 7-369 | UgpC | 369 | U00039 | 50 | 68 | prob. ABC transporter ATP-binding protein |
| y4oT | | −2 | 309132-309722 | 196 | 2-196 | Y4pA | 609 | this work | 28 | 50 | hyp. 20.6 kd protein; homologous to N-terminus of |
| | | | | | | | | | | | Y4aA, and weakly to Y4oV |
| y4oU | | +1 | 309853-311061 | 402 | | | | | | | hyp. 43.1 kd protein precurser |
| y4oV | | +2 | 311051-311908 | 285 | 3-280 | Y4pA | 609 | this work | 32 | 56 | hyp. 30.2 kd protein; homologous to N-terminus of |
| | | | | | | | | | | | Y4pA, and weakly to Y4oT |
| y4oW | | +1 | 311911-312561 | 216 | | | | | | | hyp. 23.7 kd protein |
| y4oX | | +3 | 312606-313688 | 360 | 36-233 | MocA | 317 | X78503 | 29 | 44 | prob. NAD-dep. oxidoreductase |
| y4pA | | +1 | 313714-315543 | 609 | 310-596 | HydG | 441 | U00006 | 33 | 50 | put. transcriptional regulator (sigma54-dep.) |
| | | | | | 6-290 | Y4oV | 285 | this work | 32 | 56 | |
| | | | | | 35-237 | Y4oT | 196 | this work | 28 | 50 | |
| y4pB | otsB | +3 | 316350-317147 | 265 | 30-260 | OtsB | 266 | X69160 | 41 | 57 | prob. trehalose-6-phosphate phosphatase |
| y4pC | otsA | +1 | 317185-318579 | 464 | 1-456 | OtsA | 474 | X69160 | 46 | 66 | prob. trehalose-6-phosphate synthase; similar to fq1/2 |
| fp1 | | + | 318915-319242 | | | | | U08864 | | | fragments homologous to ORF3; put. frameshift acc. to |
| | | | | | | | | | | | homologue: 319122 (3 > 1) |
| fp2 | | + | 319236-319670 | | | | | U08864 | | | fragment homologous to ORF1 from IS1248 (fr. 3); |
| | | | | | | | | | | | similar to fs4 |
| y4pD | | −1 | 319601-320116 | 171 | 13-140 | Ros | 142 | M65201 | 50 | 71 | put. transcriptional regulator (MucR family); missing Zn |
| | | | | | | | | | | | finger motif; similar to Y4aP |
| y4pE | | −1 | 320606-321013 | 135 | 1-135 | | 222 | U18764 | 91 | 94 | identical to y4sA; hyp. 15.5 kd protein hom. to N-term. |
| | | | | | | | | | | | of RFRS9 25kDa protein |
| y4pF | | −2 | 321297-322460 | 387 | 50-374 | Tnp | 334 | Z48244 | 43 | 60 | identical to y4sB; put. transposase; low similarity to |
| | | | | | | | | | | | Y4qE, Y4iB and Y4iO (<30% aa-id.) |
| y4pG | | −3 | 322486-323064 | 192 | 1-191 | ORFA | 197 | U22323 | 47 | 64 | identical to y4sC; hyp. 21.1 kd protein |
| fp3 | | +2 | 323189-323956 | | | | | X79443 | | | “ORF” homologous to ORF1 of IS1162 interrupted by |
| | | | | | | | | | | | stop codon (323444) |
| y4pH | | −1 | 323969-326053 | 694 | — | — | — | — | — | — | see y4bA |
| y4pI | | −2 | 326043-326309 | 88 | — | — | — | — | — | — | see y4bB |
| y4pJ | | −3 | 326329-326778 | 149 | — | — | — | — | — | — | see y4bC |
| y4pK | | −1 | 326969-327238 | 89 | — | — | — | — | — | — | see y4bD |
| fp4 | | +1 | 327277-328059 | | | | | L09108 | 48 | 65 | fragment homologous to put. IS-ATP-binding protein |
| y4pL | | +3 | 328071-328808 | 245 | 1-204 | ORF2 | 231 | X79443 | 51 | 63 | put. insertion sequence ATP-binding protein; similarity to |
| | | | | | 1-242 | Y4bM | 263 | this work | 55 | 73 | Y4bM/Y4I/Y4tA, Y4uH, and weakly to |
| | | | | | 1-245 | Y4uH | 248 | this work | 61 | 77 | Y4iQ/Y4nD/Y4sD (<30 aa-id.) |
| y4pM | | +2 | 329159-329977 | 272 | | | | | | | hyp. 30.9 kd protein |
| fp5 | | − | 330657-331414 | | | | | | | | put. frameshift: 331032 (2 < 1) |
| y4pN | syrM1 | −3 | 332506-333522 | 338 | 13-324 | SyrM | 326 | M33495 | 63 | 77 | probable symbiotic regulator (LysR family) |
| | | | | | 1-338 | SyrM2 | 339 | this work | 62 | 79 | |
| y4pO | | +1 | 335062-336264 | 400 | 1-400 | Tnp | 400 | M60971 | 96 | 98 | prob. transposase (Mutator family); similarity to fe7 |
| fq2 | | −2 | 333987-335003 | 338 | 1-320 | OtsA | 474 | X69160 | 44 | 61 | join fq1 + fq2: hom. to trehalose-6-phosphate synthase |
| | | | | | | | | | | | interrupted by ISRm3-like element NGRIS-8; similarity |
| | | | | | | | | | | | to Y4pC (45% aa-id.) |
| fq1 | | −1 | 336311-336694 | 128 | 44-174 | OtsA | 474 | X69160 | 48 | 67 | see fq2 |
| fq3 | | + | 337338-338056 | | | | | M26938 | | | virG homologous fragments: stop at 37380; put. |
| | | | | | | | | | | | frameshift at 337844 (3 > 2); similar to fn1 |
| y4qB | | −1 | 339053-339547 | 164 | | | | | | | hyp. 18.8 kd protein |
| y4qC | | −3 | 339535-341286 | 583 | 314-489 | ORF | 401 | Z54354 | 28 | 46 | hyp. 63.6 kd protein |
| | | | | | 1-583 | Y4oA | 593 | this work | 30 | 50 | |
| y4qD | | −3 | 343216-343950 | 244 | 1-244 | Y4rO | 618 | this work | 55 | 74 | hyp. 26.8 kd protein, similar to N-terminus of Y4rO |
| y4qE | | +2 | 344114-345286 | 390 | 37-380 | Tnp | 364 | X77623 | 38 | 57 | prob. transposase; low similarity to Y4pF/Y4sB, Y4iB, |
| | | | | | | | | | | | Y4iO and Y4rJ (<30% aa-id.) |
| fq4 | | +3 | 345798-346130 | | | | | M38257 | 34 | 51 | fragments homologous to XerC (integrase) |
| y4qF | | −2 | 346215-348479 | 754 | 41-725 | PtrII | 707 | D10976 | 31 | 49 | prob. peptidase (S9A family); high similarity to Y4sO; |
| | | | | | 32-736 | Y4sO | 705 | this work | 70 | 84 | low similarity to Y4nA (<25% id.) |
| y4qG | | −2 | 348501-349847 | 448 | 40-389 | YgiG | 454 | U32722 | 42 | 62 | prob. aminotransferase (class 3) |
| y4qH | | −1 | 350294-351274 | 326 | 144-326 | LasR | 239 | M59425 | 37 | 51 | hyp. transcriptional regulator (LuxR family) |
| y4qI | | −2 | 351837-353456 | 539 | 146-419 | ORF1 | 322 | M25805 | 44 | 63 | hyp. 59.7 kd protein; similar to Y4aQ, Y4hP, Y4jD |
| fq5 | | −3 | 353533-353775 | | | | | | | | fragments fq5 and fr3 represent one put. gene similar to |
| | | | | | | | | | | | Y4hO and Y4jC interrupted by IS elements |
| y4qJ | | −1 | 354140-355336 | 398 | 7-395 | TnpA | 388 | U14952 | 42 | 60 | put. transposase |
| y4qK | | −2 | 355344-356270 | 308 | 51-293 | Int | 259 | U14952 | 39 | 55 | put. integrase/recombinase (“phage-type”); similar to |
| | | | | | 51-308 | Y4eF | 251 | this work | 92 | 94 | Y4rF; low similarity to Y4rABCDE |
| fq6 | | −2 | 356436-356636 | 66 | 1-66 | Fe5 | 66 | this work | 79 | 94 | put. defective integrase/recombinase (“phage-type”); 75% |
| | | | | | | Y4rC | 332 | this work | 45 | 62 | nt-identity; 356436-356710 and 94988-95262 [R-20] |
| y4rA | | +1 | 356803-358032 | 409 | 17-397 | ORF2 | 415 | L34580 | 39 | 55 | put. integrase/recombinase (“phage-type”) |
| y4rB | | +3 | 358029-358973 | 314 | 135-267 | TnpI | 284 | X07651 | 30 | 51 | put. integrase/recombinase (“phage-type”) |
| y4rC | | +2 | 358970-359968 | 332 | 22-294 | XerC | 295 | U32696 | 31 | 50 | put. integrase/recombinase (“phage-type”) |
| | | | | | 267-332 | Fe5 | 66 | this work | 41 | 55 | |
| | | | | | 267-332 | Fq6 | 66 | this work | 45 | 62 | |
| y4rD | | −3 | 360025-360870 | 281 | 15-277 | XprB | 298 | M54884 | 25 | 46 | put. integrase/recombinase (“phage-type”) |
| y4rE | | −2 | 360867-361799 | 310 | 50-288 | YqkM | 296 | D84432 | 27 | 48 | put. integrase/recombinase (“phage-type”); low similarity |
| | | | | | | | | | | | to Y4gA |
| y4rF | | −1 | 361796-363073 | 425 | 126-414 | ORF2 | 415 | L34580 | 34 | 49 | put. integrase/recombinase (“phage-type”) |
| y4rG | | −1 | 363287-363694 | 135 | 16-109 | ORF1 | 130 | U19148 | 32 | 48 | hyp. 14.8 kd protein (IS866 family); low similarity to |
| | | | | | | | | | | | Y4jB, Y4hN |
| y4rH | | −3 | 363895-365331 | 478 | 62-374 | Bcp | 598 | X63470 | 26 | 44 | put. ligase; hom. to biotin carboxylases |
| fr1 | | −3 | 366307-366669 | | | | | | | | 85% aa-identity to part of Y4rL |
| fr2 | | − | 366594-367402 | | | | | | | | put. frameshift: 367296 (−2 < −1) |
| fr3 | | −3 | 367705-367827 | | | | | | | | hom. to N-term. of Y4hO; see fq5 |
| y4rI | | −3 | 368503-369675 | 390 | | | | | | | hyp. 44 kd protein |
| y4rJ | | +1 | 369697-370887 | 396 | 152-379 | Tnp | 339 | M80806 | 28 | 45 | put. transposase; low similarity to Y4qE (<30% aa-id.) |
| | | | | | 135-244 | Y4iA | 120 | this work | 74 | 87 | |
| | | | | | 266-396 | Y4iB | 130 | this work | 76 | 84 | |
| | | | | | 135-396 | Y4iO | 252 | this work | 71 | 83 | |
| | | | | | 2-131 | Y4iP | 131 | this work | 58 | 80 | |
| y4rK | | −1 | 370976-371350 | 124 | | | | | | | hyp. 14.5 kd protein |
| y4rL | | −2 | 371454-371921 | 155 | 1-99 | Y4zA | 295 | this work | 99 | 99 | hyp. 17.7 kd protein; y4rLM: two fragments of one |
| | | | | | 17-155 | Y4iE | 135 | this work | 33 | 52 | gene?; put. frameshift: 371972 (−2 < −3); 85-99% aa- |
| | | | | | | | | | | | identity to parts of Y4zA and fr1 |
| y4rM | | −3 | 371938-372990 | 350 | 258-339 | Y4zA | 295 | this work | 98 | 98 | hyp. 39.4 kd protein; see y4rL |
| y4rN | | −2 | 373578-374795 | 405 | 35-368 | P43 | 416 | X57470 | 26 | 44 | hyp. 41.6 kd integral membrane protein |
| y4rO | | +1 | 375313-377169 | 618 | 274-596 | H1N0578 | 366 | U32742 | 25 | 45 | hyp. 69.3 kd protein; N-terminus: hom. to Y4qD; C- |
| | | | | | 1-244 | Y4qD | 244 | this work | 55 | 74 | terminus: hom. to C-terminus of histidinol-1-phosphate |
| | | | | | | | | | | | transaminase |
| fr4 | | + | 377185-377534 | | | | | X66016 | | | sim. to Y4rG; put. frameshift: 377376 (1 > 3); hom. to |
| | | | | | | | | | | | fragment of ORFA3 (377409-377540) |
| y4sA | | −3 | 377842-378249 | 135 | — | — | — | — | — | — | seey4pE |
| y4sB | | −1 | 378533-379696 | 387 | — | — | — | — | — | — | see y4pF |
| y4sC | | −2 | 379722-380300 | 192 | — | — | — | — | — | — | see y4pG |
| y4sD | | −1 | 380933-381829 | 298 | — | — | — | — | — | — | see y4iQ |
| y4sE | | −3 | 381826-383340 | 504 | — | — | — | — | — | — | see y4jA |
| fs5 | | −3 | 383593-384054 | 153 | 8-150 | Tnp | 334 | Z48244 | 48 | 65 | put. defective transposase; sim. to fs1 |
| | | | 384210-384493 | | | | | | | | fragments with 94-84% nt-id. to ISRm6 (R. meliloti; |
| | | | | | | | | | | | acc. no. X95567) |
| y4sG | | +1 | 384808-385818 | 336 | 97-325 | Ddl | 306 | M14029 | 34 | 57 | hom. to D-alanine:D-alanine ligase; probably different function |
| y4sH | | +3 | 386505-387890 | 461 | 267-337 | CapA | 411 | M24150 | 42 | 63 | hom. to encapsulation protein A; nearly identical to Y4aA |
| fs1 | | − | 388138-388586 | | | Tnp | | Z48244 | | | fragments of put. transposase; put. frameshift: 388452 |
| | | | | | | | | | | | (−3 < −2); sim. to Y4pF, Y4sB, fs5 |
| fs2 | | +2 | 388697-388897 | | | ORF1 | | U19148 | 43 | 62 | put. transposase fragment; hom. to N-term. of ORF1; |
| | | | | | | | | | | | sim. to Y4jB, Y4rG, Y4hN |
| fs3 | | + | 388966-390695 | | | AtoC | | U17902 | | | put. transcriptional regulator fragment (put. frameshifts: |
| | | | | | | | | | | | 389891 (1 > 2); 390170 (2 > 3)); sim. to Y4pA, Y4oV, Y4oT) |
| y4sI | | +2 | 390971-393241 | 756 | 325-741 | McpA | 657 | X66502 | 41 | 60 | prob. methyl-accepting chemotaxis protein |
| | | | | | 1-749 | Y4fA | 845 | this work | 29 | 49 | |
| y4sJ | gapD | −3 | 393202-394677 | 491 | 29-489 | GabD | 482 | M88334 | 58 | 75 | prob. succinate-semialdehyde dehydrogenase |
| y4sK | | −1 | 394790-395170 | 126 | 5-122 | C23G10.2 | 185 | U39851 | 55 | 71 | bel. to the YER057C/YIL051C/YJGF family; probably |
| | | | | | | | | | | | important cellular function |
| y4sL | | −1 | 395204-395815 | 203 | 2-203 | DadA | 432 | L02948 | 57 | 74 | either functional dehydrogenase or non-functional |
| | | | | | | | | | | | fragment; hom. to small subunit of D-aminoacid |
| | | | | | | | | | | | dehydrogenase |
| y4sM | | +1 | 395935-396318 | 127 | 1-127 | ORF1 | 127 | X74314 | 99 | 99 | put. transcriptional regulator (AsnC/Lrp family; low |
| | | | | | | | | | | | homology to y4tD); missing H-T-H region |
| y4sN | | +1 | 396523-396900 | 125 | 1-123 | ORF2 | >123 | X74314 | 98 | 98 | similar to ORFs derived from insertion elements (IS6501 |
| | | | | | | | | | | | family); low similarity to fu4 |
| fs4 | | + | 396855-397283 | (143 | 8-141 | ORF1 | 186 | X53945 | 48 | 63 | put. IS-derived protein fragment (homology to C-term. of |
| | | | | | 1-141 | Fp2 | 145 | this work | 39 | 62 | ORF1 from IS869) |
| y4sO | | −2 | 397608-399725 | 705 | 10-694 | PtrII | 706 | D10976 | 32 | 49 | prob. peptidase (S9A family); low similarity to Y4nA |
| | | | | | 1-705 | Y4qF | 754 | this work | 70 | 84 | (<25% id.) |
| ft1 | | +3 | 400377-400625 | (83) | 20-83 | Y4tE | 300 | this work | 64 | 78 | ft1 and ft2: one put. gene encoding an amino acid ABC |
| | | | | | | | | | | | transporter binding protein interrupted by NGRIS-3c. |
| y4tA | | −3 | 400732-401523 | 263 | — | — | — | — | — | — | see y4bM |
| y4tB | | −2 | 401520-403070 | 516 | — | — | — | — | — | — | see y4bL |
| ft2 | | +1 | 403249-403899 | (216) | 5-195 | ArgT | 260 | V01368 | 25 | 48 | see ft1 |
| | | | | | 2-215 | Y4tE | 300 | this work | 76 | 86 | |
| y4tD | | +1 | 404182-404691 | 169 | 11-161 | HIN1362 | 168 | U32817 | 38 | 64 | put. transcriptional regulator (AsnC/Lrp family; but low |
| | | | | | | | | | | | homology to y4sM) |
| y4tE | | +1 | 405157-406059 | 300 | 31-281 | FliY | 257 | U32734 | 27 | 48 | prob. aminoacid ABC transporter binding protein |
| | | | | | 86-299 | Ft2 | 215 | this work | 76 | 86 | (periplasmic); prob. part of binding-protein-dep. transport |
| | | | | | | | | | | | system Y4tEFGH |
| y4tF | | +1 | 406111-406827 | 238 | 25-233 | YckJ | 234 | X77636 | 35 | 54 | prob. aminoacid ABC transporter permease protein |
| y4tG | | +3 | 406830-407525 | 231 | 1-220 | GlnP | 226 | D30762 | 32 | 54 | prob. aminoacid ABC transporter permease protein |
| y4tH | | +2 | 407522-408295 | 257 | 5-256 | GlnQ | 242 | M61017 | 52 | 71 | prob. aminoacid ABC transporter ATP-binding protein |
| y4tI | | +1 | 408745-409953 | 402 | 22-391 | Slr0072 | 393 | D64004 | 35 | 54 | put. peptidase (M40 family) |
| y4tJ | | +1 | 409990-410988 | 332 | 7-328 | Thd2 | 329 | M21312 | 35 | 57 | put. threonine dehydratase |
| y4tK | | +3 | 410988-411983 | 331 | 69-326 | ArcB | 351 | U39262 | 30 | 44 | hyp. cyclodeaminase; (sim. to ornithine cyclodeaminase) |
| y4tL | | +2 | 412118-413290 | 390 | 10-384 | ORF | 411 | D14463 | 27 | 45 | hyp. hydrolase/peptidase (M24 family) |
| | | | | | 1-389 | Y4tM | 392 | this work | 34 | 53 | |
| y4tM | | +2 | 413453-414631 | 392 | 17-390 | PepQ | 368 | Z34896 | 24 | 43 | put. hydrolase/peptidase (M24 family) |
| | | | | | 1-390 | Y4tL | 390 | this work | 34 | 53 | |
| y4tN | | +1 | 414655-415179 | 174 | | | | | | | hyp. 19.6 kd protein |
| y4tO | | +1 | 415252-416847 | 531 | 1-484 | OppA | 543 | M60918 | 28 | 46 | prob. peptide ABC transporter binding protein presurser; |
| | | | | | | | | | | | prob. part of a binding-protein-dependent transport system |
| | | | | | | | | | | | Y4tOPQRS |
| y4tP | | +2 | 416852-417793 | 313 | 4-313 | DppB | 339 | L08399 | 36 | 58 | prob. peptide ABC transporter permease protein |
| y4tQ | | +1 | 417796-418671 | 291 | 9-287 | AppC | 303 | U20909 | 36 | 56 | prob. peptide ABC transporter permease protein; |
| | | | | | | | | | | | 418611; C or T possible! |
| y4tR | | +2 | 418673-419680 | 335 | 12-327 | OppD | 336 | X56347 | 50 | 68 | prob. peptide ABC transporter ATP-binding protein |
| y4rS | | +1 | 419677-420738 | 353 | 3-320 | AppF | 329 | U20909 | 49 | 69 | prob. peptide ABC transporter ATP-binding protein |
| y4uA | | +3 | 420774-422159 | 461 | 267-337 | CapA | 411 | M24150 | 42 | 63 | put. cell wall compound biosynthesis protein; almost |
| | | | | | | | | | | | identical to Y4sH |
| y4uB | | +3 | 422628-424031 | 467 | 1-464 | BioA | 448 | U51868 | 33 | 57 | prob. aminotransferase (class 3) |
| y4uC | | +3 | 424056-425594 | 512 | 58-509 | GabD | 482 | M88334 | 33 | 52 | prob. aldehyde dehydrogenase |
| fu1 | | +2 | 425699-425779 | | | N15K | 238 | D45911 | | | put. protein fragment; 67% id. to N15K in 26 aa |
| fu2 | | +3 | 425841-426083 | | | PhbA | 393 | U17226 | | | fragment 65% identical to C-term. of beta-keto-thiolase |
| y4uD | | +1 | 426010-426507 | 165 | | | | | | | hyp. 18.7 kd protein |
| y4uE | | −3 | 426949-428028 | 359 | 78-290 | Tnp | 414 | X15942 | 31 | 45 | put. transposase (IS110 faminly); put. frameshift: between |
| | | | | | | | | | | | 427040 and 427180 (−2 < −3; end of shifted ORF: 426699) |
| y4uF | | +3 | 428292-429623 | 443 | 13-440 | GLUD1 | 558 | X07674 | 42 | 60 | prob. glutamate dehydrogenase |
| fu3 | | + | 429860-430007 | | | Tnp | 398 | U08627 | | | put. transposase fragment (92% id. in 16 aa); 85% nt- |
| | | | | | | | | | | | identity to 3′term. part of ISRm5 |
| y4uG | | +1 | 430105-430320 | 71 | | | | | | | hyp. 7.8 kd protein |
| y4uH | | −1 | 430538-431284 | 248 | 1-202 | ORF2 | 231 | X79443 | 48 | 63 | put. insertion sequence ATP-binding protein; similarity to |
| | | | | | 1-245 | Y4pL | 245 | this work | 61 | 77 | Y4pL, Y4bM/Y4kI/Y4tA and Y4iQ/Y4nD/Y4sD |
| | | | | | 1-248 | Y4bM | 263 | this work | 48 | 68 | (IS21/IS1162 family) |
| | | | | | 4-248 | Y4iQ | 298 | this work | 31 | 52 | |
| y4uI | | −3 | 431296-432840 | 514 | 1-514 | Tnp | 518 | L09108 | 44 | 63 | put. transposase; similiarity to Y4bL/Y4J/Y4tB |
| | | | | | | | | | | | (IS21/IS1162 family) |
| fu4 | | − | 433222-433560 | | | Tnp | 201 | X65471 | | | put. tranposase fragments (74-92% id. in 88 aa); 79% nt- |
| | | | | | | | | | | | identity to 5′term. of ISRm4 |
| y4uJ | fixU | −1 | 433880-434110 | 76 | 1-70 | FixU | 70 | X51963 | 63 | 80 | hyp. 8.5 kd protein |
| y4uK | nifZ | −3 | 434107-434433 | 108 | 6-79 | ORF2 | >78 | X07567 | 52 | 78 | put. nitrogen fixation NifZ protein |
| y4uL | fdxN | −2 | 434517-434711 | 64 | 1-64 | FdxN | 64 | M21841 | 79 | 84 | prob. 4Fe4S ferredoxin |
| y4uM | nifB | −1 | 434753-436234 | 493 | 1-493 | NifB | 490 | M15544 | 72 | 81 | involved in FeMo cofactor biosynthesis |
| y4uN | nifA | −1 | 436460-438244 | 594 | 37-594 | NifA | 584 | U31630 | 62 | 74 | positive regulator of nif, fix, and additional genes |
| | | | | | | | | | | | (sigma54-dep.) |
| y4uO | fixX | −2 | 438297-438590 | 97 | 2-97 | FixX | 98 | M15546 | 84 | 89 | prob. 3Fe-3S ferredoxin inv. in nitrogen fixation |
| y4uP | fixC | −1 | 438605-439912 | 435 | 1-435 | FixC | 435 | M15546 | 82 | 89 | required for nitrogenase acitivity |
| y4vA | fixB | −2 | 439923-441032 | 369 | 18-363 | FixB | 353 | M15546 | 79 | 87 | putatively inv. in a redox process in nitrogen fixation |
| y4vB | fixA | −2 | 441042-441899 | 285 | 1-280 | FixA | 292 | M15546 | 75 | 90 | putatively inv. in a redox process in nitrogen fixation |
| fv1 | | −1 | 442181-442252 | | | NifS | 384 | X68444 | | | put. NifS fragment (70% identity in 24 aa) |
| y4vC | | −1 | 442316-442636 | 106 | 1-106 | ORF118 | 118 | X13691 | 54 | 72 | hyp. 11 kd protein (HesB/YadR/YfhF family); |
| | | | | | | | | | | | homologues located upstream of nifS |
| y4vD | | −2 | 443313-443879 | 188 | 5-173 | HIN1693 | 241 | U32848 | 46 | 60 | put. redox enzyme (hom. to glutaredoxin-like membrane |
| | | | | | | | | | | | protein and peroxysomal membrane proteins) |
| y4vE | nifQ | +1 | 444337-445029 | 230 | 56-212 | NifQ | 180 | M26323 | 39 | 56 | putatively involved in Mo cofactor processing |
| y4vF | dctA1 | +2 | 445088-446602 | 504 | 1-443 | DctA1 | 456 | S38912 | 99 | 99 | C₄-dicarboxylate transport protein; nt-deletion at 446416 |
| | | | | | | | | | | | in comparison to sequence of acc. no. S38912 causing a |
| | | | | | | | | | | | frameshift (DctA1 is 48 aa longer than DctA1 in S38912) |
| y4vG | | +1 | 446599-447843 | 414 | 13-413 | CamC | 415 | M12546 | 34 | 50 | prob. cytochromeP450 |
| y4vH | | +1 | 447844-448500 | 218 | (32-157 | LinA | 155 | D90355 | 28 | 46) | hyp. 24.6 kd protein (with very weak homology to |
| | | | | | | | | | | | gamma-hexachlorocyclohexane-dechlorinase) |
| y4vI | | +3 | 448557-450203 | 548 | 9-250 | FabG | 244 | U39441 | 38 | 56 | short-chain type dehydrogenase/reductase |
| | | | | | 276-513 | | | | 30 | 48 | |
| y4vJ | | +2 | 450341-451396 | 351 | 1-188 | LuxA | 357 | M36597 | 27 | 47 | put. monooxygenase; similar to Y4wF; |
| y4vK | nifHl | +1 | 451993-452883 | 296 | 1-296 | NifH | 296 | M26961 | 99 | 99 | Fe protein of nitrogenase |
| y4vL | nifDl | +1 | 452980-454494 | 504 | 199-393 | NifD | >195 | M26962 | 98 | 99 | alpha-subunit of MoFe protein of nitrogenase |
| y4vM | nifKl | +3 | 454590-456131 | 513 | 132-195 | NifK | >64 | M26963 | 100 | 100 | beta-subunit of MoFe protein of nitrogenase |
| y4vN | nifE | +1 | 456187-457677 | 496 | 1-469 | NifE | 547 | X56894 | 62 | 78 | involved in FeMo cofactor biosynthesis |
| y4vO | nifN | +1 | 457687-459096 | 469 | 1-455 | NifN | 441 | M18272 | 70 | 81 | involved in FeMo cofactor biosynthesis |
| y4vP | nifX | +3 | 459093-459575 | 160 | 22-156 | NifX | 159 | X17433 | 52 | 68 | nitrogen fixation protein |
| y4vQ | | +3 | 459579-460067 | 162 | 22-162 | ORF4 | 156 | X17433 | 49 | 70 | hyp. 17.7 kd protein, similar to proteins of other |
| | | | | | 1-162 | Y4xD | 162 | this work | 61 | 75 | nitrogen-fixing bacteria and to Y4xD |
| y4vR | | +1 | 460501-460920 | 139 | 1-58 | NifH | 296 | M26961 | 50 | 63 | similar to N-term. of Fe protein of nitrogenase |
| y4vS | fdxB | +2 | 461228-461545 | 105 | 1-88 | ORF5 | 102 | M26323 | 52 | 65 | prob. 4Fe-4S ferredoxin |
| y4wA | | +1 | 463201-464739 | 512 | 86-499 | PqqE | 709 | L43135 | 50 | 70 | hyp. zinc protease (M16 family); sim. to Y4wB |
| y4wB | | +3 | 464736-466079 | 447 | 236-438 | PqqF | 213 | L43135 | 42 | 61 | put. protease (lacks Zn-binding site; M16 family); sim. to Y4wA |
| y4wC | | +3 | 466590-467021 | 143 | 8-132 | ORF3 | 127 | L13845 | 48 | 66 | put. DNA-binding protein; high similarity to Y4aM |
| | | | | | 1-143 | Y4aM | 143 | this work | 69 | 77 | |
| y4wD | | +1 | 467758-468891 | 377 | 11-370 | MosC | 407 | U23753 | 29 | 48 | permease-type protein; hom. to membrane protein from |
| | | | | | | | | | | | the rhizopine biosynthesis (mosABC) gene cluster |
| y4wE | | +3 | 469311-470417 | 368 | 20-361 | His1 | 356 | D14440 | 32 | 53 | prob. aminotransferase (class 2) |
| y4wF | | +1 | 470824-471852 | 342 | 40-194 | LuxA | 354 | X06758 | 27 | 54 | put. monooxygenase; sim. to Y4vJ |
| y4wG | | +2 | 471890-472435 | 181 | | | | | | | hyp. 19.4 kd protein |
| y4wH | | +3 | 473343-473780 | 145 | 1-145 | ORF2 | 145 | M19352 | 64 | 76 | hyp. 15.6 kd protein |
| y4wI | | −2 | 473928-475469 | 513 | | | | | | | hyp. 59 kd protein |
| y4wJ | | −2 | 475503-475880 | 125 | | | | | | | hyp. 13.3 kd protein |
| y4wK | nifW | −1 | 476519-476971 | 150 | 12-118 | NifW | 108 | M86823 | 50 | 63 | NifW protein homolog; required for full activity of FeMo protein |
| y4wL | nifS | −2 | 477135-478298 | 387 | 4-387 | NifS | 402 | M17349 | 58 | 73 | prob. NifS protein (member of class-5 pyridoxal- |
| | | | | | | | | | | | phosphate-dep. aminotransferase family) |
| y4wM | | −2 | 479145-481136 | 663 | 225-620 | YejA | >409 | U00008 | 38 | 55 | put. ABC transporter binding protein (transporter or |
| | | | | | | | | | | | enzymatic function) |
| fw1 | | −1 | 481460-481834 | 124 | 1-116 | DctA | 441 | M26531 | 55 | 61 | hyp. truncated transporter-like protein; hom. to N-term. of |
| | | | | | | | | | | | DctA (see y4vF); two frameshifts acc. to homologue: |
| | | | | | | | | | | | 481606 (−3 < −1); 481530 (−2 < −3; homology stops at |
| | | | | | | | | | | | 481419) |
| y4wO | | −3 | 481834-482154 | 106 | | | | | | | hyp. 11 kd protein |
| y4wP | | +2 | 482540-482947 | 135 | | | | | | | hyp. 14.9 kd protein |
| y4xA | nifH2 | +1 | 483871-484761 | 296 | 1-296 | NifH | 296 | M26961 | 99 | 99 | Fe protein of nitrogenase |
| y4xB | nifD2 | +1 | 484858-486372 | 504 | 199-393 | NifD | >195 | M26962 | 98 | 99 | alpha-subunit of MoFe protein of nitrogenase |
| y4xC | nifK2 | +3 | 486468-488009 | 513 | 132-195 | NifK | >64 | M26963 | 100 | 100 | beta-subunit of MoFe protein of nitrogenase |
| y4xD | | +3 | 488262-488750 | 162 | 22-162 | ORF4 | 156 | X17433 | 47 | 73 | hyp. 18 kd protein; similar to proteins of other nitrogen- |
| | | | | | 2-162 | Y4vQ | 162 | this work | 61 | 75 | fixing bacteria and to Y4vQ |
| y4xE | | +1 | 488773-488976 | 67 | 1-64 | ORF1 | 69 | X55450 | 40 | 67 | hyp. 7.6 kd protein; similar to proteins of other nitrogen- |
| | | | | | | | | | | | fixing bacteria |
| y4xF | | +3 | 488973-489149 | 58 | | | | | | | hyp. 6.5 kd protein |
| y4xQ | | +2 | 489281-89583 | 100 | 14-83 | ExoX | 98 | M6I751 | 31 | 52 | put. exopolysaccharide production repressor (intrgal |
| | | | | | | | | | | | membrane protein) |
| y4xG | | +2 | 490010-491527 | 505 | | | | | | | hyp. 55.5 kd protein |
| y4xH | nodD2 | −2 | 491655-492593 | 312 | 1-312 | NodD2 | 312 | L38460 | 99 | 99 | transcriptional regulator (LysR family); high similarity to |
| | | | | | 1-310 | NodD1 | 322 | this work | 68 | 83 | Y4aL (NoD1) |
| y4xI | | +2 | 494297-494977 | 226 | 1-224 | PmrA | 222 | L13395 | 39 | 58 | signal transduction-type regulator |
| y4xJ | | +1 | 495157-496428 | 423 | 76-378 | GPIV | 426 | J02451 | 27 | 46 | hyp. protein hom. to proteins of the general secretion |
| | | | | | | | | | | | pathway (pulD family), sim. to Y4yD (NolW) |
| y4xK | | +1 | 496438-497004 | 188 | | | | | | | hyp. 20.6 kd protein precurser |
| y4xL | | −1 | 497444-498460 | 338 | | | | | | | hyp. 37.1 kd protein |
| y4xM | | −1 | 498719-499933 | 404 | 23-403 | ORF1 | 408 | X59939 | 22 | 49 | permease-type protein |
| | | | | | | (YceE) | | | | | |
| y4xN | | −3 | 499930-501816 | 628 | 183-505 | IucC | 580 | X76100 | 28 | 43 | hyp. 71 kd protein hom. to aerobactin synthetase subunit |
| y4xO | | −2 | 501816-502955 | 379 | | | | | | | hyp. 40.9 kd protein |
| y4xP | | −1 | 502952-503962 | 336 | 5-304 | CysK | 308 | D26185 | 40 | 60 | put. cysteine synthase |
| y4yA | | −1 | 503963-505336 | 457 | | | | | | | hyp. 49.9 kd protein; low similarity to diaminopimelate |
| y4yB | | −3 | 505336-505800 | 154 | | | | | | | hyp. 17.1 kd protein |
| y4yC | nolX | −2 | 505950-507740 | 596 | 1-596 | NolX | 596 | L12251 | 98 | 99 | nodulation protein as in R. fredii USDA257 |
| y4yD | nolW | −3 | 508021-508725 | 234 | 1-234 | NolW | 234 | L12251 | 99 | 100 | nodulation protein (PulD family); sim. to Y4xJ |
| y4yE | nolB | +3 | 508881-509375 | 164 | 1-164 | NolB | 164 | L12251 | 98 | 99 | nodulation protein |
| y4yF | nolT | +3 | 509385-510254 | 289 | 1-289 | NolT | 289 | L12251 | 96 | 97 | nodulation protein precurser (YscJ homolog; M74011) |
| y4yG | nolU | +2 | 510251-510889 | 212 | 1-212 | NolU | 212 | L12251 | 99 | 99 | nodulation protein |
| y4yH | nolV | +3 | 510891-511517 | 208 | 1-60 | ORF4 | 65 | L12251 | 100 | 100 | homologous to two (nodulation) proteins of R. fredii |
| | | | | | 73-208 | NolV | 135 | | 96 | 97 | USDA257 (YscL homolog; M74011) |
| y4yI | hrcN | +2 | 511514-512869 | 451 | 35-450 | YscN | 439 | U00998 | 55 | 73 | prob. ATPase involved in secretion |
| | | | | | 1-80 | HrcN | 450 | L12251 | 97 | 97 | |
| | | | | | 105-450 | | | | 97 | 98 | |
| y4yJ | | +1 | 512845-513381 | 178 | 1-178 | ORF7 | 178 | L12251 | 97 | 98 | hyp. 20.4 kd protein |
| y4yK | hrcQ | +1 | 513406-514482 | 358 | 171-350 | YscQ | 307 | L25667 | 27 | 46 | prob. translocation protein inv. in secretion processes |
| | | | | | 1-358 | HrcQ | 382 | L12251 | 96 | 98 | (FliN/MopA/SpaO family) |
| y4yL | hrcR | +2 | 514475-515143 | 222 | 6-216 | YscR | 217 | L25667 | 46 | 66 | prob. translocation protein inv. in secretion processes |
| | | | | | 1-222 | HrcR | 249 | L12251 | 99 | 99 | (Flip/MopC/SpaP family) |
| y4yM | hrcS | +1 | 515143-515418 | 91 | 1-66 | YscS | 88 | L25667 | 34 | 65 | prob. translocation protein inv. in secretion processes |
| | | | | | 1-91 | HrcS | 92 | L12251 | 98 | 100 | (FliQ/MopD/SpaQ family) |
| y4yN | hrcT | +3 | 515427-516245 | 272 | 28-250 | YscT | 261 | L25667 | 31 | 52 | prob. translocation protein inv. in secretion processes |
| | | | | | 1-272 | HrcT | 272 | L12251 | 98 | 99 | (FliR/MopE/SpaR family) |
| y4yO | hrcU | +2 | 516242-517279 | 345 | 5-339 | YscU | 354 | L25667 | 30 | 50 | prob. translocation protein inv. in secretion processes |
| | | | | | 1-340 | HrcU | 351 | L12251 | 99 | 99 | (FlhB/HrpN/YscU/SpaS family) |
| y4yP | | +1 | 518077-518892 | 271 | 35-262 | HipA | 295 | M19019 | 88 | 91 | homolog is inducible by root-exudate and diadzein; |
| | | | | | | | | | | | frameshift acc. to homologue: 518855 (1 > 2) |
| fy1 | | + | 519655-519995 | | | NolJ | 148 | L26967 | | | nodulation gene homologous fragments (80-100% id. in |
| | | | | | | | | | | | 97 aa); frameshifts acc. to homologue: 519789 (1 > 3); |
| | | | | | | | | | | | 519900 (3 > 2); 519965 (2 > 3) |
| y4yQ | | +2 | 520280-521170 | 296 | | | | | | | hyp. 31.3 kd integral membrane protein |
| y4yR | | +2 | 521360-523453 | 697 | 17-677 | LcrD | 704 | M96850 | 40 | 65 | prob. translocation protein inv. secretion processes |
| | | | | | | | | | | | [Flagella/HR/Invasion proteins export pore (FHIPEP) family] |
| y4yS | | +3 | 523470-524018 | 182 | | | | | | | hyp. 20.1 kd protein |
| y4zA | | +2 | 525005-525892 | 295 | 34-115 | Y4rM | 350 | this work | 98 | 98 | hyp. (fragmentous?) 32.9 kd protein; put. frameshift: |
| | | | | | 133-231 | Y4rL | 155 | this work | 99 | 99 | 525699 (2 > 3); similar to Y4iE |
| y4zB | | +1 | 526051-527121 | 356 | 60-320 | Tnp | 377 | X67862 | 29 | 47 | put. (fragmentous?) transposase (IS4 family) 526103- |
| | | | | | | | | | | | 526200 higher cod. prob. in fr. 2; put. frameshift: 526200 |
| | | | | | | | | | | | (2 > 1) |
| fzl | | + | 527337-527902 | | | Hdc | 378 | J02577 | | | fragments homologous to histidine decarboxylases (30- |
| | | | | | | | | | | | 45% id. in 134aa); put. frameshift (3 > 2) around 527478 |
| y4zC | | +3 | 529125-529910 | 261 | 65-248 | AvrPph3 | 276 | M86401 | 27 | 41 | hyp. 28.3 kd protein; hom. to avirulence protein |
| y4zD | | +3 | 530145-530294 | 49 | | | | | | | hyp. 5.5 kd protein |
| fz4 | | +2 | 530432-530764 | 110 | 1-110 | Y4jA | 504 | this work | 72 | 85 | hom. to C-terminus of Y4jA/Y4nE/Y4sE |
| fz2 | | + | 530761-531250 | | | ORFB | 251 | X67861 | | | put. IS-ATP-binding protein fragments (32-40% id. in |
| | | | | | | | | | | | 137aa); put. frameshift acc. to homolog: 531062 (1 > 2) |
| y4zF | syrM2 | +2 | 532676-533695 | 339 | 1-320 | SyrM | 326 | M33495 | 69 | 81 | prob. symbiotic regulator (LysR family) |
| | | | | | 1-335 | SyrM1 | 338 | this work | 62 | 79 | |
| fz3 | | + | 534257-534422 | | | ORF | 338 | M73488 | | | fragments homologous to 1-aminocyclopropane-1- |
| | | | | | | | | | | | carboxylate deaminase (63-83% id. in 56aa); put. |
| | | | | | | | | | | | frameshift: 534291 |

^{a}open reading frame (ORF)
^{b}strand (−/+) or frame (−1; −2; −3; +1; +2; +3)
^{c}number (no.)
^{d}aminoacids (aa)
^{e}GenBank/EMBL accession numbers
^{f}identity (I) and similarity (S) have been calculated by the programme BESTFIT (local homology algorithm; Smith and Waterman, 1981) of the WISCONSIN SEQUENCE ANALYSIS PACKAGE (version 8.0, GCG, Madison, USA)
^{g}abbreviations: prob. = probable; cod. prob. = coding probability; acc. = according; inv. = involved; sim. = similar; id. = identical; fr. = frame; acc. no. = accession number; nt = nucleotide; hyp. = hypothetical; put. = putative; hom. = homologous; dep. = dependent; N/C-term. = N/C-terminus

[0059] role of some ORFs like the luciferase-like ORFs (y4vJ and y4wF; see Table 3) in rhizobia is still not clear. In the 100 kb region, the duplication of a 5 kb sequence (position 451,886 to 456,157 and 483,764 to 488,035) including the genes nifHDK is remarkable. These genes encode the basic subunits of the nitrogenase. Furthermore, the transcriptional regulator nodD2 is very interesting because its role seems not to be identical to a previously identified nodD2 in a closely related strain (Appelbaum et al., 1988; data not shown). Also the pmrA-homologous ORF y4xI putatively plays an important role in regulating symbiotic processes because a nod box (binding region for the basic regulator nodD1; Fisher and Long, 1993) is located upstream of this ORF (position 493,962 to 494,000). Finally, the presence of ORFs (y4yI and y4yK to y4yN; see Table 3) homologous to type III secretion proteins, which have only been known previously in plant or animal/human pathogenic bacteria, shows that there only seems to be a subtle difference between symbiotic and pathogenic abilities of microorganisms.

[0060] In a second stage, the remaining 436 kb of pNGR234a were analyzed. Several ORFs and their deduced proteins were identified that belong to functional groups not previously identified in the analysis of cosmids pXB296, pXB368 and pXB110 (replication of the plasmid, conjugal transfer of the plasmid, functions in oligosaccharide biosynthesis and cleavage, functions in sugar or sugar-derivative metabolism, functions in lipid or lipid-derivative metabolism, functions in chemoperception/chemotaxis, functions in biosynthesis of cofactors, prosthetic groups and carriers, etc.).

[0061] Although further functional analyses of selected ORFs in pNGR234a still have to be performed, large-scale sequencing gives a global picture of their genomic organization and possible roles. Determination of putative functions of predicted genes by homology searches and identification of sequence motifs (promoters, nod boxes, nifA activator sequences, and other regulatory elements) will aid in finding new symbiotic genes. High-fidelity sequence data covering long stretches of the genome are a prerequisite for these studies. The use of the dye terminator/thermostable sequenase shotgun approach has allowed the completion of the entire ˜500 kb sequence of pNGR234a and has opened up new avenues for the genetic analysis of symbiotic function.

[0062] Genetic Organization of the Whole Plasmid pNGR234a

[0063] Within the complete nucleotide sequence of pNGR234a, which comprises 536,165 bp, a total of 416 ORFs were predicted to encode proteins. An additional 67 ORF-fragments were detected that seem to be remnants of functional ORFs.

[0064] Thirty four percent (139) of the 416 potential proteins, have no obvious similarities to any known proteins. Of the remaining 277 proteins, 31 (8%) are similar to proteins for which no biochemical or phenotypic role has been assigned, 12 (3%) are similar to proteins for which limited biological data is available, and 234 (56%) are similar to proteins with a more precise biological function: enzymes (95), proteins involved in integration and recombination of insertion elements (44), transporters (32), transcriptional regulators (22), protein secretion/export (21), proteins involved in replication and control of the plasmid (12), electron transporters (6), and proteins involved in chemotaxis (2). A high proportion of enzymes was expected of a symbiotic replicon involved in nodulation (Nod-factor biosynthesis, etc.) and nitrogen fixation. As expected from the observation that NGR234 can be cured of its plasmid (Morrison et al., 1983), no ORFs essential to transcription, translation or to primary metabolism were found.

[0065] A large number of protein families are present in several copies on pNGR234a. This is true even after elimination of the many proteins which are encoded in repeated IS elements, or are involved in transposition, integration or recombination. The most notable examples of highly represented protein families include: five members of the short-chain dehydrogenase/reductase family, one of which (y4vI) contains two homologous domains; five complete and one partial ABC-type transporter operons that each encode for at least one ABC-type permease and an ABC-type ATP-binding protein; four cytochrome P450's; and three members of peptidase family S9A. In total, 85 proteins belong to families that are represented more than once and which do not seem to be linked to insertion or recombination.

[0066] The majority (330, 79%) of the putative proteins are probably located in the cytoplasm of the bacterium, 62 (15%) possibly span membranes, 20 (5%) could be located in the periplasm, 3 are predicted to be lipoproteins that could associate with the outer membrane, and 2 are probably outer membrane proteins. These observations accord well with the dominance of biosynthetic proteins, as well as proteins involved in transcriptional regulation and insertion/recombination, most of which are thought to be cytoplasmic.

[0067] Although other start points cannot be excluded, replication of pNGR234a probably begins at oriV which is located within the intergenic sequence (igs) between the repC and repB-like genes y4cI and y4cJ. This locus (positions 54,417 to 54,570) encodes three proteins with 40-60% amino acid identities to RepABC of pTiB6S3 (a Ti-plasmid of Agrobacterium tumefaciens), pRiA4b (an Ri-plasmid of A. rhizogenes) and pRL8JI (a cryptic plasmid of R. leguminosarum bv. leguminosarum). Amongst replication regions, highest identities (69 to 71% at the nucleotide level) are found in the igs's between repC and repB (FIG. 5). In Agrobacterium, these igs's are the determinants which render parental plasmids incompatible. Two ORF's (position 198,500), which are homologous to pseudomonal genes involved in plasmid stability, may also play a role in replication of pNGR234a. A 12 bp portion of the origin of transfer (oriT) is identical to that of pTiC58 of Agrobacterium tumefaciens (nt 80,162 to 80,173), and highly similar to those of RSF1010 (Escherichia coli) and pTFI (Thiobacillus ferrooxidans). This sequence corresponds to the oriT of plasmids containing the “Q-type nick-region” (FIG. 6).

[0068] Another 24 predicted ORFs show homologies to conjugal transfer genes of Agrobacterium Ti-plasmids. All are located in two large clusters between position 57,000 to 83,000. Since pNGR234a was believed to be non-transmissible (Broughton et al., 1987), the fact that both the nucleotide sequence of the individual ORFs and their order is similar in Agrobacterium and NGR234 came as a surprise. Conjugal transfer of Ti plasmids in A. tumefaciens is controlled by a family of N-acyl-L-homoserine lactone auto-inducers (Zhang et al., 1993). Similar molecules, which are able to interact with the traR gene product of A. tumefaciens, were detected in the supernatants of NGR234 cultures using the assay of Piper et al. (1993).

[0069] Reiterated sequences first became apparent in NGR234 during the construction of an ordered array of cosmid clones (Perret et al., 1991). It is now clear that 97 kbp (18%) of pNGR234a represents insertion-(IS) and mosaic-(MS) sequences (FIG. 7). Homology searches for known IS/MS revealed some of these, while comparison of repeated sequences within pNGR234a, as well as between the plasmid and 2,500 random chromosome sequences (V. Viprey, pers. communication) located the rest. Seventy five putative ORFs (18% of the total) and 40 fragments of ORFs were identified this way, nearly half of which (44) show homologies to integrases and transposases. Many of these IS elements are similar not only to those derived from Rhizobium and Agrobacterium species, but also to those of other, diverse Gram (−) and Gram (+) bacteria (e.g. Bacillus, Escherichia, and Pseudomonas). The shear number and diversity of these IS/MS elements suggests that NGR234 has functioned as a “transposon trap”. This is supported by the fact that their average G,C content (61.5%) is 3% higher than that of pNGR234a (58.5%). Interestingly, many IS/MS are clustered between positions 300,000 to 390,000 (FIG. 7), while some loci are almost unaffected by insertions (oriV, nod-, fix- and nif-ORFs). Small IS/MS clusters divide the replicon into large blocks of often functionally related ORFs (e.g. blocks of nod-ORFs, replication and conjugal transfer ORFs, nif-ORFs and fix-ORFs). A list of all sequences with IS-elment or mosaic sequence character is given in Table 4. Although transposition of these IS/MS elements has not been demonstrated, transfer of plasmids amongst rhizobia in the legume rhizosphere (Broughton et

TABLE 4
Insertion/mosaic sequences in pNGR234α

| | | | put. ORFs/ | | | |
|---|---|---|---|---|---|---|
| | | | ORF-fragments | | | homologous |
| start of region | stop of region | name of region | included | similarities within pNGR234α | similarities to chromosome | sequences in other organisms/comments |
| 17000 | 17600 | ISH-10b | y4aQ | 33% aa-id. to y4hP (ISH-10a) | | geneproducts from IS866 and IS66 from |
| | | | | | | Ag. tumefaciens |
| 18900 | 19661 | ISH-11b | fa2 | 54% aa-id. to part of y4bF (ISH-11a); | | Tnp of IS1202 from Str. pneumoniae |
| | | | | 19096-19362: 91% nt-id. to ISH-11c | | |
| 19666 | 22981 | NGRIS-4a | y4bABCD | identical to NGRIS-4b | many copies on the chromosome | |
| 22985 | 25400 | ISH-11a | fb1, y4bF | y4bF: sim. to fb1 and fa2 (ISH-11b) | partially 91% nt-id. to chromosomal sequences | Tnp of IS1202 from Str. pneumoniae |
| 32463 | 35085 | NGRIS-3a | y4bLM | identical to NGRIS-3b/c | copie(s) on the chromosome | 62% nt-id. (over 2352 nt) to IS1162 of |
| | | | | | | Ps. fluorescens (IS21/IS1162/IS408 family) |
| 49300 | 50300 | ISH-13a | y4cG | similar to y41S (ISH-13b) | | DNA invertase |
| 69936 | 70385 | ISH-4c | fd1 | 70233-70385: 93% nt-id. to part of | | ORFA of IS5376 from B. stearothermophilus |
| | | | | NGRIS-4 | | |
| 93322 | 96025 | ISH-12a | fe2, y4eF, fe5, | 93574-94927: 90% nt-id. to ISH-12b1; | | Tnp (fe2) and Int (Y4eF, fe3) from Weeksella |
| | | | fe3 | 75% nt-id. to fq6 region (ISH-12b2); | | zoohelcum-IS-element; (93322-94586: 57% nt-id. to |
| | | | | 95343-95558: 88% nt-id. to ISH-12b3 | | IS292 from Ag. radiobacter); “phage” integrase |
| | | | | | | family (Y4eF, fe5, fe3) |
| 101939 | 102394 | ISH-8b | fe7 | | | 84% nt-id. to ISRm5 of R. meliloti; fe7: mutator |
| | | | | | | family of transposases |
| 115881 | 116004 | MSH-14b | | partially homologous to ISH-14a | 72-73% nt-id. to sequences downstream from | mosaic element |
| | | | | | chvl/upstream from rpoN on the chromosome | |
| 124396 | 124500 | MSH-14a | | partially homologous to ISH-14b | 82% nt-id. to sequence RIME1 downstream from | mosaic element |
| | | | | | chvI on the chromosome; parts of MSH-14a show | |
| | | | | | 73-89% nt-id. to chromosomal sequences | |
| 126806 | 127369 | ISH-12f | y4gA | low, similarity to y4rE | | |
| 127900 | 128500 | ISH-12e | y4gC | | | recombinase from pAE1 of Al. eutrophus (“phage” |
| | | | | | | integrase family) |
| 131000 | 131800 | ISH-15 | y4gE* | | partially 87% nt-id. to chromosomal sequences | |
| 159781 | 160564 | ISH-16 | | | | 96% nt-id. to repetitive sequence from R. fredii |
| | | | | | | USDA257 (acc. no. M73698) |
| 164600 | 167700 | ISH-10a | y4hNOPQ | | 99% nt-id. of parts of y4hPQ to chromosomal | different ORFs derived from IS-like sequences; |
| | | | | | sequences | partially known as acc. no. X74068 (“Region2” |
| | | | | | | from pNGR234a); 164853-167086; 66% nt-id. to |
| | | | | | | IS66 from Ag. tumefaciens |
| 168208 | 169190 | ISH-2c | fi1, fi2, fi3 | 168343-168659: 72% nt-id. to | | 168208-168383: 70 nt-id. to ISRm2011-2 |
| | | | | ISH-2f1/ISH-2d1 | | (R. meliloti); fi2/3: IS1111A, IS1328, IS1533 |
| | | | | 168785-169091: 73% nt-id. to ISH- | | family of transposases |
| | | | | 2f2/ISH-2d2 | | |
| 173295 | 173702 | ISH-8g | y4iE* | y4iE: sim. to y4rL, y4zA. and fr2 | | |
| 175590 | 175909 | ISH-11c | y4iG* | 175643-175909: 91% nt-id. to ISH-11a | | |
| 185672 | 186507 | ISH-2d | y4iO*/P* (3′- | 185672-186075(−): 73% nt-id. to ISH- | | Y4iO: Tnp of IS1328 from Y. enterocolitica |
| | | | end) | 2c2(+) | | (IS1111A, IS1328, IS1533 family) |
| | | | | 186208-186507(−): 72% nt-id. to ISH- | | |
| | | | | 2c1(+) | | |
| 187112 | 189752 | NGRIS-5a | y4iQjA | identical to NGRIS-5b/c | copie(s) on the chromosome | IstA and B (Tnps) of IS1326 from E coli |
| | | | | | | (IS21/IS1162/IS408 family) |
| 190000 | 193500 | ISH-10c | y4jBCD(E*) | 38/32 aa-id. of y4jCD to y4hOP | | different ORFs derived from IS-like sequences; |
| | | | | (ISH10a) | | partially 60% nt-id. to IS866 (Ag. tumefaciens); |
| | | | | | | IS292 (Ag. radiobacter); ISR11 (R. leguminosarum) |
| 193518 | 193634 | MSH-17 | | | | 76% nt-id. to repetitive sequence RMX6 from |
| | | | | | | Myxococcus xanthus (acc. no. M60865) |
| 199746 | 199958 | ISH-11d | y4jM* | similarity to fb1 and y4bF (ISH-11a) | | |
| 211165 | 211265 | ISH-10g | | | | 74% nt-id. to ISR11 (R. leguminosarum), |
| | | | | | | IS66/IS866 derivative |
| 212350 | 212580 | ISH-10h | fk2 | similar to y4jD (ISH-10c) | | 74% nt-id. to IS66 |
| 217564 | 220186 | NGRIS-3b | y4kIJ | identical to NGRIS-3a/c | copie(s) on the chromosome | 62% nt-id. (over 2352 nt) to IS1162 of |
| | | | | | | Ps. fluorescens (IS21/IS1162/IS408 family) |
| 224547 | 224995 | ISH-18a | y4kQ | 83% nt-id. to ISH18b (427651-428102) | | IS110 family |
| | | | (3′-end) | | | |
| 240800 | 241040 | ISH-24b | fl2 | | | 60% nt-id. to ISR12 from R. leguminosarum |
| 244540 | 244851 | ISH-19a | fl4 | 244620-244812: 97% nt-id. to ISH-19b | | TnpA from Tn163 (R. leguminosarum) |
| 248290 | 248655 | ISH-19b | fl5 | 248463-248655: 97% nt-id. to ISH-19a | | |
| 248814 | 249680 | ISH-20 | fl6 | | | Tnp of Tn1546 (Enterococcus faecium; |
| | | | | | | Tn21/501/1721 family) |
| 251407 | 252400 | ISH-13b | y41SmA | y41S: similar to y4cG (ISH-13a) | | y41S: invertase; 58% nt-id. (251409-252211) to |
| | | | | | | Tn501 from Ps. aeruginosa (acc. no. Z00027) |
| 258551 | 258657 | MSH-21 | | | | mosaic sequence: 82% nt-id. to sequence |
| | | | | | | upstream of ropA2 (R. liguminosarum; acc. no. |
| | | | | | | X80794) |
| 280403 | 283043 | NGRIS-5b | y4nDE | identical to NGRIS-5b/c | copie(s) on the chromosome | IstA and B (Tnps) of IS1326 from E. coli |
| | | | | | | (IS21/IS1162/IS408 family) |
| 284722 | 284985 | ISH-1b | fn2 | | | 60% nt-id. to IS1162 (Ps. fluorescens, |
| | | | | | | IS21/IS1162/IS408 family) |
| 300017 | 300819 | ISH-1c | fo3 | | | 61% nt-id. IS408 (Ps. cepacia; |
| | | | | | | IS21/IS1162/IS408 family) |
| 300820 | 304117 | NGRIS-6 | fo4/5/6, | 77% nt-id. to NGRIS-4 | | |
| | | | y4oL/M/N | | | |
| 304118 | 304434 | ISH-1d | fo7 | | | 61% nt-id. IS408 (Ps. cepacia; |
| | | | | | | IS21/IS1162/IS408 family) |
| 318854 | 319686 | NGRIS-7 | fp1-2 | | | 66% nt-id. to IS1248 of Pa. denitrificans |
| 320456 | 328935 | NGRRS-1a | fp3/4; y4pL | | 3 copies on the chromosome | interrupted by NGRIS2a and 4b; fp3/4, Y4pL: |
| | | | | | | IS21/IS1162/IS408 family |
| 320590 | 323147 | NGRIS-2a | y4pEFG | identical to NGRIS-2b | | partially 88-990% nt-id. to repetitive sequence |
| | | | | | | RFRS9 of R. fredii USDA257 (IS1111A/IS1328/ |
| | | | | | | IS1533 family) |
| 323961 | 327276 | NGRIS-4b | y4pHIJK | identical to NGRIS-4a | many copies on the chromosome (disrupts all 4 | |
| | | | | | copies of NGRRS-1) | |
| 335004 | 336301 | NGRIS-8 | y4pO | similar to fe7 (ISH-8b) | | 88% nt-id. to ISRm3 of R. meliloti: mutator family |
| | | | | | | of transposases |
| 342272 | 342419 | ISH-12d | | 342272-342419: 87% nt-id. to ISH- | | |
| | | | | 12b4 | | |
| 344100 | 345300 | ISH-2e | y4qE | | | Tnp (Leptospira borgpetersenii): |
| | | | | | | IS1111A/IS1328/IS1533 family |
| 345755 | 346133 | ISH-12c | fq4 | 345755-346133: 82% nt-id. to ISH- | | Int (XerC, E. coli): “phage” integrase family |
| | | | | 12b5 | | |
| 351600 | 351735 | MSH-22 | | | | 80 nt-id. to sequence from pTiS4 (Ag. vitis; acc. no. |
| | | | | | | M91609) |
| 351826 | 353794 | ISH-10d | y4qI, fq5 | fq5: 35% aa-id. to y4hQ (ISH-10a) | 71-95% nt.-id. of parts of y4qI to chromosomal | 67% nt-id. to ISR11 (R. leguminosarum; acc. no. |
| | | | | | sequences | L19650); IS866/66 homolog |
| 354000 | 363073 | ISH-12b | y4qJK, fq6, | 354942-356123/356215-356383: | 70% nt-id. of parts of ISH14a1 to chromosomal | Tnp and Int from Weeksella zoohelcum -IS-element |
| | | | y4rABCDEF | 90/91% nt-id. to ISH-12a1; | sequences | (y4qJK), different integrases (y4rAB), integrase |
| | | | | 75% nt-id. to fe5 region (ISH-12a2): | | XerC of H. influenzae (y4rC); |
| | | | | 359753-359968. 88% nt-id. to ISH- | | y4qK, fq6, y4rABCDEF: “phage” integrase family |
| | | | | 12a3; | | |
| | | | | 361029-361410: 82% nt-id. to ISH-12c | | |
| | | | | 362507-362654: 87% nt-id. to ISH-12d | | |
| 363287 | 363694 | ISH-10i | y4rG | low similarity to y4jB and fr4 (ISH- | | unknown protein from IS1312 (A. tumefaciens)/ |
| | | | | 10c/i) | | IS866 |
| 366252 | 367402 | ISH-8f | fr1, fr2 | 366252-366524: 88% nt-id. to ISH-8e | | |
| | | | | 366773-366953: 92% nt-id. to ISH-8g | | |
| 367699 | 367970 | ISH-10c | fr3 | 56% aa-id. of fr3 to y4hO (ISH-10a) | | 75% nt-id. to IS66 (Ag. tumefaciens) |
| 368503 | 369675 | ISH-23 | y4rI | | 91-93% nt-id. of parts of y4rI to chromosomal | |
| | | | | | sequences | |
| 369697 | 370887 | ISH-2f | y4rJ | 370012-370328: 72% nt-id. to ISH-2c1 | | y4rJ: Tnp from IS1111a of Coxiella burnitii |
| | | | | 370479-370785: 73% nt-id. to ISH-2c2 | | (IS1111A/IS1328/IS1533 family) |
| 371399 | 372990 | ISH-8e | y4rL*M* | 371399-371671: 88% nt-id. to ISH-8f | | |
| | | | | 371474-372228: 97% nt-id. to ISH-8d | | |
| 377185 | 377695 | ISH-10j | fr4 | similar to y4rG (ISH-10i) | | 377327-377695: 75% nt-id. to ISRm6 (R. meliloti) |
| 377826 | 380383 | NGRIS-2b | y4sABC | identical to NGRIS-2a | | partially 88-90% nt-id. to repetitive sequence |
| | | | | | | RFRS9 of R. fredii USDA257 (IS1111A/IS1328/ |
| | | | | | | IS1533 family) |
| 380883 | 383523 | NGRIS-5c | y4sDE | identical to NGRIS-5a/b | copie(s) on the chromosome | IstA and B (Tnps) of IS1326 from E. coli |
| | | | | | | (IS21/IS1162/IS408 family) |
| 383593 | 384054 | ISH-2g | fs5 | | | Tnp of IS1328 of Y. enterocolitica |
| | | | | | | (IS1111A/IS1328/IS1533 family) |
| 384210 | 384493 | ISH-10k | | | | fragments with 94-84% nt-id. to ISRm6 |
| | | | | | | (R. meliloti) |
| 388100 | 388600 | ISH-2h | fs1 | | | different Tnps (IS1111A/IS1328/IS1533 family) |
| 388601 | 388900 | ISH-10l | fs2 | | | ORF from IS1312 of Ag. tumefaciens (IS66/866 |
| | | | | | | family) |
| 396445 | 397301 | NGRIS-9 | y4sN and fs4 | | 91-99% nt-id. of NGRIS9-parts to chromosomal | different ORFs derived from IS elements; partially |
| | | | | | sequences | known from acc. no. X74314 |
| 400626 | 403248 | NGRIS-3c | y4tAB | identical to NGRIS-3a/b | copie(s) on the chromosome | 62% nt-id. (over 2352 nt) to IS1162 of |
| | | | | | | Ps. fluorescens (IS21/IS1162/IS408 family) |
| 426525 | 428102 | ISH-18b | y4uE* | 427651-428102: 83% nt-id. to ISH-18a | 77-96% nt-id. of ISH-18b-parts to chromosomal | Tnp of mini-circle DNA from Str. coelicolor |
| | | | | | sequences | (IS110 family) |
| 429860 | 430007 | ISH-8c | fu3 | | | 85% nt-id. to ISRm5 (R. meliloti) |
| 430568 | 432851 | ISH-1e | y4uHI | | | 60% nt-id. to IS408/IS1162 |
| | | | | | | (Ps. cepacia/Ps. fluorescens) |
| 433222 | 433560 | ISH-24a | fu4 | low similarity to y4sN (NGRIS-9) | | 79% nt-id. to ISRm4 (R. meliloti)/ISR12-like |
| 462554 | 463053 | ISH-10f | | | | fragments with 83-69% nt-id. to IS866 |
| | | | | | | (Ag. tumefaciens) |
| 524946 | 525892 | ISH-8d | y4zA | 525095-525849: 97% ni-id. to ISH-8e | | 524946-525580: 61% nt-id. to ISRm5 (R. meliloti) |
| 526051 | 527121 | ISH-25 | y4zB* | | | Tnp of IS5376 from B. stearothermophilus (IS4 |
| | | | | | | family of transposases) |
| 530364 | 531249 | ISH-1f | fz4, fz2 | 79% nt-id. to part of NGRIS-5 | | fz4/2: IS21/IS1162/IS408 family |

Abbreviations: Tnp = transposase; Int = integrase: nt-id. = nucleotide-identity; aa-id. = aminoacid identity
IS elements with precisely defined borders are designated as NGRRS/NGRIS-1 to 9. Other sequences which show homologies to known mosaic or IS-like sequences (mosaic/insertion sequence homologs) are named MSH and ISH. respectively.

[0070] al., 1987) and to other non-symbiotic bacteria in fields (Sullivan et al., 1995) suggests that lateral transfer of genetic information has helped shape symbiotic potential.

[0071] Carbohydrates are constituents of the rhizobial cell wall as well as morphogens called Nod-factors (short tri- to penta-mers of N-acetyl-D-glucosamine, substituted at the non-reducing terminus with C16 to C18 saturated or partially unsaturated fatty acids). Elements of the biosynthetic pathways leading to cell walls or to lipo-chito-oligosaccharides (Nod-factors) are common. Most differences are found in the later stages of the pathways that lead to specific cell-wall components or to Nod-factors.

[0072] As befits a symbiotic replicon, only 13 ORF's with homology to polysaccharide synthesis genes (house-keeping genes senso stricto) are located on the plasmid (Table 3). Sequences homologous to exoB, exoF, exoK, exoL, exoP, exoU, and exoX (X. Perret and V. Viprey, unpublished), and exoY (Gray et al., 1990) are clearly located on the chromosome. Although loci with weak homologies to nod-box:-psiB of R. leguminosarum, and exoX of R. meliloti exist on the plasmid (y4iR, and y4xQ respectively), these are regulatory rather than structural genes, suggesting that almost all cell wall polysaccharide synthesis ORFs are chromosomally located.

[0073] Except for nodPQ and nodE, at least one copy of all the regulatory and structural ORFs involved in Nod-factor biosynthesis seem to be located on the plasmid. The activity of most nodulation genes is modulated by four transcriptional regulators of the lysR family. These are nodD1 (y4aL), syrM1 (y4pN), nodD2 (y4xH), and syrM2 (y4zF). NodC, which is an N-acetylglucosaminyltransferase, the first committed enzyme in the Nod-factor biosynthetic pathway, is part of an operon which includes nodABCIJnolOnoeIE (y4hI to y4hB, Table 3). Together, these genes, which form the hsnIII locus, are responsible for the synthesis of the core Nod-factor molecule, and the adjunction of 3- (or 4)-O-carbamoyl, 2-O-methyl, and 4-O-sulfate groups (Hanin et al., unpublished). nodZ (y4aH), which encodes a fucosyltransferase, is part of the hsnI locus, which includes noeJ (y4aJ), noeK (y4aI), noeL (y4aG), nolK (y4aF), all of which are involved in the fucosylation of NodNGR factors (Fellay et al., 1995a). Wild-type NodNGR factors are also N-methylated and 6-O-carbamoylated, adjuncts which are added by the transferases encoded by nodS and nodU respectively [y4nC and y4nB; hsnII (Lewin et al., 1990)]. Possibly the only other enzyme which may be directly involved in Nod-factor biosynthesis is that encoded by nolL (y4eH, Table 3). As the 2-O-methylfucose residue of NGR234 Nod-factors is either 3-O-acetylated, or 4-O-sulphated, an acetyltransferase is obviously required. Since NolL shows only limited homology to acetyltransferases, experimental proof of the transferase activity will be required however.

[0074] In contrast to R. leguminosarum and R. meliloti harbouring pNGR234a, A. tumefaciens (pNGR234a) transconjugants are incapable of nitrogen fixation (Broughton et al., 1984), suggesting that some essential fix-ORFs are also carried by the chromosome. Nevertheless, more than 40 nif- and fix-ORFs are plasmid borne. Included amongst these are nifA (y4uN) which encodes for a sigma-54 dependent regulator. Mutation of rpoN (which encodes sigma 54) causes a Fix⁻ phenotype on NGR234 hosts (van Slooten et al., 1990). Similarly, mutation of fixF (y4gN) disrupts synthesis of a rhamnose-rich extra-cellular polysaccharide, and results in a Fix⁻ phenotype on Vigna unguiculata, the reference host for NGR234 (unpublished). In fact, loci adjacent to fixF are probably responsible for the synthesis of dTDP-rhamnose from glucose-1-phosphate. Enzymes involved in this biosynthetic pathway include glucose-1-phosphate thymidylyltransferase (y4gH), dTDP-glucose-4,6-dehydratase (y4gF), dTDP-4-dehydrorhamnose-3,5-epimerase (y4gL), and dTDP-4-dehydrorhamnose reductase (y4gG). Rhamnose-rich lipopolysaccharides (LPS) seem to be necessary for complete bacteroid development and nitrogen fixation (Krishnan et al., 1995). Perhaps the enzyme encoded by y4gI is needed for the synthesis of the rhamnose rich LPS's from dTDP-rhamnose.

[0075] Although not directly involved in the fixation process, mutation of the plasmid borne copy of dctA (=dctA1, y4vF) also impairs nitrogen fixation (van Slooten et al., 1992). Other nif- and fix-ORFs are involved in elaboration of the electron-transfer complex (fixAB), in various cofactors required for nitrogen fixation (e.g. fixC, nifB, nifE, niJN, etc.), and in the synthesis of ferrodoxins (fdxB, fdxN, fixX). Finally, those ORFs involved in the synthesis of the nitrogenase complex are also present. Amongst these are two functional copies of the nifKDH ORFs (y4vM to y4vK and y4xC to y4xA) (Badenoch-Jones et al., 1989). Additionally, 17 new ORFs located within the nitrogen fixation cluster (see FIG. 7; ORFs y4vC to y4vJ with the exception of dctAl, y4wA to y4wG, y4wI, y4wJ and y4xQ) are co-transcribed together with the ORFs homologous to known nif and fix genes. It thus seems likely that most ORFs necessary for bacteroid development and synthesis of the nitrogen-fixing complex, are carried by pNGR234a.

[0076] Two types of regulatory elements which frequently occur in pNGR234a are the NodD- and NifA/sigma-54-dependent promoters. NodD-dependent promoter-like sequences known as nod boxes have been identified by homology search within intergenic regions, using the following consensus sequence: 5′-YATCCAYNNYRYRGATGNNNNYNATCNAAACAATCRATTTT ACCAATCY-3′ [12 mismatches allowed (van Rhijn and Vanderleyden, 1993); Y=C or T, R=A or G, N=A, C, G or T]. Putative NifA-dependent promoters (Fischer, 1994) have been predicted by screening for the NifA activator sequence (5′-TGT-N₁₀-ACA-3′) together with the sigma-54 promoter consensus sequence (5′-TGGCAC-N₅-TTGCA/T-3′ with GG and GC as the most conserved doublets; 3 mismatches allowed) separated by 60 to 150 nucleotides. The identified conserved promoter-like sequences in pNGR234a are listed in Tables Sand 6.

TABLE 5
nod box-like sequences in pNGR234a

| | | | number of | | |
|---|---|---|---|---|---|
| | | | mismatches to the | | |
| nod | position in | orien- | consensus | distance to the | name of the |
| box | pNGR234a | tation | sequence | following ORF | following ORF |
| 1 | 4514-4562 | − | 11 | 504 | (fa1) |
| 2 | 8481-8529 | − | 8 | 87 | nodZ |
| 3 | 12322-12370 | − | 7 | — | ?# |
| 4 | 97470-97518 | − | 6 | 277 | nolL |
| 5 | 129615-129663 | + | 10 | 1358 | y4gE |
| 6 | 141088-141136 | + | 8 | 890 | fixF |
| 7 | 150280-150327 | − | 11 | 202 | noeE |
| 8 | 158820-158868 | − | 4 | 235 | nodA |
| 9 | 161891-161939 | + | 11 | 1103 | y4hM |
| 10 | 169833-169881 | − | 7 | 117 | y4iR |
| 11 | 278947-278995 | − | 7 | 153 | nodS |
| 12 | 279821-279869 | + | 7 | — | ?# |
| 13 | 443101-443149 | − | 10 | 465 | y4vC |
| 14 | 473059-473107 | + | 9 | 236 | y4wH |
| 15° | 481253-481301 | − | 16 | 117 | y4wM |
| 16 | 493961-494009 | + | 6 | 288 | y4xI |
| 17 | 532039-532087 | + | 5 | 589 | syrM2 |
| 18 | 256434-256482 | + | 12 | 329 | y4mC |
| 19 | 469151-469199 | + | 12 | 112 | y4wE |

°The majority of the mismatches is located in the 3′-terminal part of the sequence.
#No predicted ORF can be found downstream of the putative nod box.

[0077] TABLE 6
Putative NifA-dependent promoters in pNGR234a

| | | sigma-54 promoter | | distance to the | |
|---|---|---|---|---|---|
| | NifA-dep. UAS*: | (−12/−24 region#): | orien- | following ORF | name of the |
| Nr. | position | position | tation | (nt) | following ORF |
| 1 | 90812-90827 | 90910-90924 | + | 127 | y4eD |
| 2 | 162727-162742 | 162788-162802 | + | 240 | y4hM |
| 3 | 235036-235051 | 234934-234948 | − | 66 | y4lD |
| 4 | 255021-255036 | 255130-255144 | + | 306 | y4mB |
| 5 | 285265-285280 | 285343-285357 | + | 50 | y4nG |
| 6 | 436363-436378 | 436275-436289 | − | 41 | nifB |
| 7 | 442046-442061 | 441955-441969 | − | 56 | fixA |
| 8 | 442735-442750 | 442676-442690 | − | 40 | y4vC |
| 9 | 444109-444124 | 443983-443997 | − | 104 | y4vD |
| 10 | 444137-444152 | 444241-444299° | + | 38° | nifQ |
| 11 | 451782-451799 | 451891-451905 | + | 88 | nifH1 |
| 12 | 460319-460334 | 460424-460438 | + | 63 | y4vR |
| 13 | 463063-463078 | 463139-463153 | + | 48 | y4wA |
| 14 | 478839-478854 | 478761-478775 | − | 463 | nifS |
| 15° | 483663-483678 | 483769-483783 | + | 88 | nifH2 |

*“Upstream Activator Sequence”: NifA-binding site located 80 to 150 nt upstream of the transcription start point (5′-TGT-N₁₀-ACA-3′).
#sequence corresponding to the consensus sequence of conserved sigma-54-promoters 12 nt upstream of the transcription start point: 5′-TGGCAC-N₅-TTGC-3′ (2 mismatches allowed).
°3 possibilities for a promoter (in two cases only corresponding to the minimal consens: 5′-GG-N₁₀-GC-3′)

### EXAMPLES

### Example 1

### GENERAL METHODS

[0078] Bacteria and Plasmids

[0079] Escherichia coli was grown on SOC, in TB or in two-fold YT medium (Sambrook et al., 1989). The cosmid clones pXB296 and pXB110 (Perret et al., 1991) were raised in E. coli strain 1046 (Cami and Kourilsky, 1978). Subclones in M13mp18 vectors (Yanisch-Perron et al., 1985) were grown in E. coli strain DH5αF′IQ (Hanahan, 1983).

[0080] Construction of Cosmid Libraries

[0081] Cosmid DNA was prepared by standard alkaline lysis procedures followed by purification in CsCl gradients (Radloff et al., 1967). DNA fragments sheared by sonication of 10 μg of cosmid DNA were treated for 10 min at 30° C. with 30 units of mung bean nuclease (New England Biolabs, Beverly, Mass., USA), extracted with phenol/chloroform (1:1), and precipitated with ethanol. DNA fragments, ranging in size from 1 to 1.4 kbp, were purified from agarose gels using Geneclean II (Bio101, Vista, Calif., USA) and ligated into SmaI-digested M13pm18. Electroporation of aliquots of the ligation reaction into competent E. coli DH5αF′IQ was performed according to standard protocols (Dower et al., 1988; Sambrook et al., 1989).

[0082] M13 Template Preparation

[0083] Fresh 1 ml E. coli cultures in twofold YT held in 96-deep-well microtiter plates (Beckman Instruments, Fullerton, Calif., USA) were infected with recombinant phages from white plaques grown on plates containing X-gal (5-bromo-4-chloro-indoyl-β-D-galactoside) and IPTG (isopropyl-β-thiogalactopyranoside). Rapid preparation of -0.5 Mg of single-stranded M13 template DNA was carried out as follows: 190 μl portions of the phage cultures grown for 6 hr at 37° C. were transferred into 96-well microtiter plates. Lysis of the phages was obtained by adding 10 μl of 15% (w/v) SDS followed by 5 min incubation at 80° C. Template DNA was trapped using 10 μl (1 mg) of paramagnetic beads (Streptavidin MagneSphere Paramagnetic Particles Plus M13 Oligo, Promega, Madison, Wis., USA) and 50 μl of hybridization solution [2.5 M NaCl, 20% (w/v) polyethylene glycol (PEG-8000)] during an annealing step of 20 min at 45° C. Beads were pelleted by placing microtiter plates on appropriate magnets and washing three times with 100 μl of 0.1-fold SSC. The DNA was recovered in 20 μl of water by a denaturation step of 3 min at 80° C. When required, larger amounts of single-stranded recombinant DNA (>10 μg) were purified using QIAprep 8 M13 Purification Kits (Qiagen, Hilden, Germany) from 3 ml of supernatant of phage cultures grown for 6 hr at 37° C.

[0084] Sequencing

[0085] Two sequencing methods were used: dye terminator and dye primer cycle sequencing, each in combination with AmpliTaq DNA polymerase (Perkin-Elmer) and Thermo Sequenase (Amersham). All reactions, including ethanol precipitation, were performed in microtiter plates. Reagents were pipetted using 12-channel pipettes. Where necessary, sequencing reaction mixtures, including enzymes, were pipetted into the plates in advance and held at -20° C. until needed.

[0086] Dye Terminator Cycle Sequencing

[0087] For dye terminator/AmpliTaq DNA polymerase sequencing, 0.5 μg of template DNA, and the PRISM Ready Reaction DyeDeoxy Terminator cycle sequencing Kit (Perkin-Elmer) were used. Cycle sequencing was performed in microtiter plates using 25 PCR cycles (30 sec at 95° C., 30 sec at 50° C., and 4 min at 60° C). Prior to loading the amplified products on electrophoresis gels, unreacted dye terminators were removed using Sephadex columns scaled down to microtiter plates (Rosenthal and Charnock-Jones, 1993).

[0088] Dye terminator/Thermo Sequenase sequencing was performed using the same experimental conditions except that the reaction mix contained 16.25 mM Tris-HCl (pH 9.5), 4.0 mM MgCl₂, 0.02% (v/v) NP-40, 0.02% (v/v) Tween 20, 42 μM 2-mercaptoethanol, 100 μM dATP/dCTP/dTTP, 300 μM dITP, 0.017 μM A/0.137 μM C/0.009 μM G/0.183 μM T from Taq Dye Terminators (Perkin-Elmer; no. A5F034), 0.67 μM primer, 0.2-0.5 μg of template DNA, and 10 units of Thermo Sequenase (Amersham) in a 30 μl reaction volume. Unincorporated dye terminators were removed from reaction mixtures by precipitation with ethanol.

[0089] Dye Primer Cycle Sequencing

[0090] Dye primer/AmpliTaq DNA polymerase sequencing reactions were performed according to the instructions accompanying the Taq Dye Primer, 21M13 Kit (Perkin-Elmer). Cycle sequencing was carried out on 0.5 μg of template DNA with 19 PCR cycles (30 sec at 95° C., 30 sec at 50° C., and 90 sec at 72° C.) followed by six cycles, each consisting of 95° C. for 30 sec and 72° C. for 2.5 min. Prior to electrophoresis, the four base-specific reactions were pooled and precipitated with ethanol.

[0091] Identical PCR conditions and the Thermo Sequenase Fluorescent Labelled Primer Cycle Sequencing Kit (Amersham) were used for dye primer/Thermo Sequenase sequencing reactions.

[0092] Sequence Acquisition and Analysis

[0093] Gel electrophoresis and automatic data collection were performed with ABI 373A DNA sequencers (Perkin-Elmer). After removing cosmid vector and M13mp18 sequences from the shotgun sequence data, the data were assembled using the program XGAP (Dear and Staden, 1991) and edited against the fluorescent traces. To close remaining gaps, to make single-stranded regions double-stranded, and to clarify ambiguities, additional cycle sequencing reactions with selected shotgun templates were carried out using either custom-made primers (primer-walks) or universal primer.

[0094] The complete double-stranded DNA sequence of cosmid pXB296 was analyzed using programs from the Wisconsin Sequence Analysis Package (version 8, Genetics Computer Group, Madison, Wis., USA). Homology searches were performed with BLAST (version 1.4; Altschul-et al., 1990) and FASTA (version 2.0; Pearson and Lipman, 1988). Several nucleotide and protein databases were screened (GenBank/Genpept, SwissProt, EMBL, and PIR). Identities and similarities between homologous amino acid sequences were calculated with the alignment program BESTFIT (Smith and Waterman, 1981).

### Example 2

[0095] Comparison of Fluorescent Traces Created by Different Cycle Sequencing Methods

[0096] When using a thermostable sequenase [Thermo Sequenase (Amersham)], the concentrations of dye terminators (Perkin-Elmer) can be reduced by 20- to 250-fold in comparison to the concentrations needed for Tag DNA polymerase without compromising the quality of the sequencing results (Table 7).

[0097] To compare the dye terminator and dye primer cycle sequencing procedures, representative templates derived from the pXB296 library were sequenced by both methods, each performed with Thermo Sequenase and Taq DNA polymerase

TABLE 7
Concentrations (in μM) of dye terminators in each cycle sequencing
reaction with two different thermostable DNA polymerases

| Dye | AmpliTaq DNA | Thermo Sequenase | Dilution factor for |
|---|---|---|---|
| terminator | polymerase | DNA polymerase | dye terminators^{a} |
| A Taq | 0.751 | 0.017 | 40 |
| C Taq | 22.500 | 0.137 | 160 |
| G Taq | 0.200 | 0.009 | 20 |
| T Taq | 45.000 | 0.183 | 250 |

^{a}Thermo Sequenase vs. AmpliTaq.

[0098] (FIG. 1). In general, dye terminator traces do not contain the many compressions (on average, one compression every 50 bases in single reads) that are common with dye primers if mixes do not contain nucleotide analogues like deoxyinosine or 7-deaza-deoxyguanosine triphosphates or if sequencers are used without active heating systems. In addition, dye terminator traces obtained with Thermo Sequenase show more uniform signal intensities over those obtained with Taq DNA polymerase, thus resulting in a reduced number of weak and missing peaks (e.g. a weak G-signal following an A-signal in Thermo Sequenase traces or a weak C-signal following a G-signal in Taq DNA polymerase traces). Using ABI 373A sequencers, errors in automatic base-calling of Thermo Sequenase/dye terminator scans only arise after 300-350 bases. The average number of resolved bases in dye primer gels (378 bases) is 46 bases longer than in those produced with dye terminators (332 bases). Furthermore, in Thermo Sequenase/dye primer sequences the peaks are very regular and the number of stops and missing bases decreases in comparison to Tag DNA polymerase/dye primer electropherograms. The number of compressions, however, is not significantly reduced.

### Example 3

[0099] Shotgun Sequencing of Entire Cosmids Using Dye Terminators or Dye Primers

[0100] To compare the efficiency of both methods, cosmid pXB296 of pNGR234a was shotgun sequenced using a combination of dye terminators and thermostable sequenase (Thermo Sequenase), whereas another cosmid, pXB110, was sequenced using a combination of dye primers and Taq DNA polymerase (Table 1). Over 93% (736 clones) of 786 dye terminator reads of pXB296 were accepted by XGAP with a maximal alignment mismatch of 4%. By increasing this level to 25%, so that most of the remaining data could be included in the assembly, 775 reads led to three 6 to 10 kbp stretches of contiguous sequence (contigs), two of which were joined after editing. To close the last gap and to complete single-stranded regions with data derived from the opposite strand, only 32 additional dye terminator reads using custom-made primers were required. It took <1 week to assemble and finalize the 34,010 bp DNA sequence of pXB296 (EMBL accession no. Z68203; eight-fold redundancy; GC content, 58.5 mol %).

[0101] In contrast, only 308 (34%) of 899 shotgun reads obtained by Taq DNA polymerase/dye primer cycle sequencing of pXB110 were included in the first assembly (4% alignment mismatch). At the 25% alignment mismatch level, 879 reads were assembled, leading to 25 short contigs (1-2 kbp). These contigs had to be edited extensively in order to join most of them. “Primer walks”, covering gaps and complementing single-stranded regions, were not sufficient to clarify all the remaining ambiguities in the assembled sequence. Every 100-150 bp, a compression in one strand could not be resolved by sequence data from the complementary strand. Therefore, it was necessary to resequence clones using dye terminators and universal primer. In total, 191 additional dye terminator reads had to be created. As a result, assembling and finalizing the 34,573 bp sequence of pXB110 (10.5-fold redundancy; GC content, 58.3 mol %) took much more time than pXB296 did.

### Example 4

[0102] Analysis of Cosmid pXB296

[0103] Putative ORFs were located on the 34,010 bp sequence of pXB296 using the programs TESTCODE (Fickett, 1982) and CODONPREFERENCE (Gribskov et al., 1984), the latter in combination with a codon frequency table based on previously sequenced genes of Rhizobium sp. NGR234 (as well as the closely related R. fredii). All 28 ORFS and their deduced amino acid sequences exhibited significant homologies to known genes and/or proteins. The positions of the ORFs along pXB296, as well as the best homologues, are displayed in Table 2 and FIG. 2. Ribosomal binding site-like sequences (Shine and Dalgarno, 1974) precede each putative ORF except for ORF9 (position 11,214-12,455). If one disregards the homology to known glutamate dehydrogenases in the first 32 amino acids deduced from this ORF, a downstream alternative start codon (position 11,220) preceded by a Shine-Dalgarno sequence can be identified. Most of the ORFs are organised in five clusters (ORFs with only short intergenic spaces or overlaps between them). Cluster I, containing ORF1 to ORF5, encodes proteins homologous to trans-membrane and membrane-associated oligopeptide permease proteins and to a Bacillus anthracis encapsulation protein. Cluster II, includes ORF6 and ORF7, which are homologous to aminotransferase and (semi)aldehyde dehydrogenase genes. Homologies to transposase genes [ORF8; cluster III (ORF10 and ORF11)] and to various nif and fix genes [cluster IV (ORF12 to ORF20); ORF23, part of cluster V] are also reported.

[0104] Presumed promoter and stem-loop sequences that might represent ρ-independent terminator-like structures (Platt, 1986) are shown in FIG. 2. Significant σ⁵⁴-dependent promoter consensus sequences (5′-TGGCACG-N₄-TTGC-3′; Morett and Buck, 1989), as well as nifA upstream activator sequences (5′-TGT-N₁₀-ACA-3′; Morett and Buck, 1988), are found upstream of the nifB homologue ORF15, the fixA homologue ORF20, ORF21, ORF22, and ORF23. ORF23 is part of cluster V in pXB296, which includes the dctA gene of Rhizobium sp. NGR234 (van Slooten et al., 1992). Surprisingly, the published dctA sequence shows important discrepancies. Therefore, a fragment encompassing this locus was amplified by PCR using NGR234 genomic DNA as template. By sequencing this fragment, the cosmid sequence of the present invention was confirmed.

### Example 5

[0105] Analysis of the Complete Plasmid pNGR234a

[0106] Using the thermostable sequenase/dye terminator cycle sequencing method herein described, 20 overlapping cosmids (including pXB296) of the symbiotic plasmid pNGR234a of Rhizobium sp. NGR234 were sequenced, together with two PCR products and a subcloned DNA fragment derived from cosmid pXB564 that cover two remaining gaps (position 276,448-277,944 and position 480,607-483,991). The map of the sequenced cosmids is shown in FIG. 4. The entire assembled 536 kb sequence of pNGR234a is given in FIG. 3 (deposited in EMBL/GenBank under accession no. U00090).

[0107] The analysis of the complete nucleotide sequence revealed few regions of 98-100% identity to already published sequences in public databases. These sequences are listed in Table 8. These sequences had been derived either from Rhizobium sp. NGR234, derivatives of it or closely related strains of it. Therefore, the ORFs and their deduced proteins, 98-100% homologous to nifH, nodA, nodB, nodC, nodD1, nodS, nodU, nolX, nolW, nolB, nolU and “ORF1”, represent already known genes/proteins (Table 8 and References). Some other ORFs and their deduced proteins, nearly identical to public database entries, were either only partially known before the disclosure of the present invention or exhibited significant differences, for instance, dctA, host-inducible gene A, nifD, nifK, nodD2, nolT, nolX, nolV, “ORF140”, “ORF91”, “RSRS9 25 kDa-protein gene” (Table 8 and References).

[0108] As a first step, approximately 100 kb of pNGR234a was analyzed between position 417,796 to 517,279 using the programs TESTCODE (Fickett, 1982) and CODONPREFERENCE (Gribskov et al., 1984). In this initial ˜100 kb of sequence, 76 ORFs were found and ascribed putative functions

TABLE 8
All ORFs that show 98-100% identity in the nucleotide sequence to
ORFs located in pNGR234a and that have already been published in databases:

| | | EMBL/GeneBank | + | claimed in the patent application/ |
|---|---|---|---|---|
| ORF | organism | accession no. | − | not claimed in the patent application |
| dctA | Rhizobium sp. NGR234 | S38912 | + | sequencing mistakes in the database entry: the |
| | | | | real dctA in pNGR23a is 144 bases longer (see |
| | | | | table 4) |
| host inducible geneA | Rhizobium fredii USDA 201# | M19019 RFIND | + | significant difference in pNGR234a (frameshift; |
| | | | | see table 4) |
| nifH | Rhizobium sp. ANU 240* | M26961 RHMNIFKDH3 | − | |
| nifD (partially) | Rhizobium sp. ANU 240* | M26961 RHMNIFKDH2 | + | only part of nifD is in the public database |
| nifK (partially) | Rhizobium sp. ANU 240* | M26961 RHMNIFKDH1 | + | only part of nifK is in the public database |
| nodABC | Rhizobium fredii USDA 257# | M73362 RSNOD2 | − | |
| nodD1 | Rhizobium sp. mpik 3030* | Y00059 RSNODD1 | − | |
| nodD2 | Rhizobium japonicum USDA 191# | M18972 RHMNODD2M | + | significantly different function of NodD2 in |
| | | | | NGR234 than in USDA 191 (despite of 98% |
| | | | | identity °) |
| nodS | Rhizobium sp. NGR234 | J03686 NGRNOIDSU | − | |
| nodU (partially) | Rhizobium sp. NGR234 | J03686 NGRNODSU | − | |
| nodU (full) | Rhizobium sp.* | X89965 RSNODUGEN | | |
| nolXWBTUV | Rhizobium fredii USDA 257# | L12251 RHMNOLBTU | − | nolXWB, nolU |
| | | | + | NolT: 97% identical (amino acid sequence level) |
| | | | + | NolX, NolV + ORF4 of pNGR234a show |
| | | | | significant differences to USDA 257 (see table 4) |
| ORF1; ORF2(partially) | Rhizobium sp. NGR234 | X74314 RSORF | − | |
| ORF140 nodulation gene; | Rhizobium sp. NGR234 | X74068 RSPLAS | + | database entry includes sequencing mistakes |
| ORF91(partially) | | | | causing frameshifts |
| RFRS9 25kDa protein gene* | Rhizobium fredii USDA 257# | U18764 RFU18764 | + | repetitive element in pNGR234a showing |
| | | | | insertions, deletions of nucleotides in |
| | | | | comparison to the database entry |

*strains representing derivatives of NGR234: Rhizobium sp. ANU 240, Rhizobium sp. mpik 3030, Rhizobium sp.
#strains closely related to NGR234: Rhizobium fredii USDA 257, Rhizobium japonicum USDA 191, Rhizobium fredii USDA 201.
° identity in nucleotide sequence as well as amino acid sequence

[0109] (=ORFs y4tQ to y4yO (excluding ORFs y4uD, y4uG, y4wG, y4wO, y4wP, y4xF, y4xQ, y4xG and y4yB and excluding ORF-fragments fu1, fu2, fu3, fu4, fv1 and fw1); see Table 3). It should be noted that since the sequence of cosmid pXB296 forms part of this 100 kb region, all of the ORFs identified in Table 2 (except “ORF1”) are reproduced (albeit with minor, but definitive, revisions) in Table 3. Most of the 76 ORFs and their deduced proteins showed homologies to public database entries that could help identify their putative functions. Only ORFs y4vK and y4xA (duplicated nifH) as well as y4yD, y4yE and y4yG (nolW, nolB and nolU) were identical to database entries (98-100% homology). In the case of 7 ORFs and their deduced proteins, no homologous sequences in public databases have been found.

[0110] As a second step, the remaining 436 kb of pNGR234a were analyzed using the methods noted above. The results of this analysis are discussed in Example 6.

### Example 6

[0111] Genetic Organization of the Complete Plasmid pNGR234a

[0112] In order to confirm and to improve the identification of probable coding regions in pNGR234a, the program GeneMark was used which is based on matrices developed for related organisms of Rhizobium sp. NGR234 (R. leguminosarum and R. meliloti (Borodovsky et al., 1994)). The use of this program currently represents the most frequently applied method to distinguish coding and non-coding regions in newly sequences DNA of prokaryotes. Further analysis of the putative ORF products was carried out using methods to detect signal sequences, transmembrane segments and various other domains (PROSITE database search (Bairoch et al., 1995); PSORT program (Nakai et al., 1991)).

[0113] In total, 416 ORFs were predicted to encode putative proteins (Freiberg et al., 1997). Additionally, 67 fragments were detected that seemed to be remnants of functional ORFs. Some of these were disrupted by insertion of mobile elements. All identified functional ORFs and fragments of former functional ORFs are listed in Table 3.

[0114] Within the initial ˜100 kb region (position 417,796 to 517,279) first analyzed in this study, 9 ORFs (y4uD, y4uG, y4wG, y4wO, y4wP, y4xF, y4xQ, y4xG and y4yB) and 6 ORF-fragments (fu1, fu2, fu3, fu4, fv1 and fw1) were predicted in addition to the 76 ORFs (y4tQ to y4yO) listed within Table 3.

[0115] According to Table 8, 12 ORFs of the 416 predicted coding regions were identical to public database entries (98% to 100% homology at the amino acid level), namely: y4hI (nodA), y4hH (nodE), y4hG (nodC), y4aL (nodD1), y4nC (nods), y4nB (nodU), y4sM (ORF1), y4vK (niftH), y4xA (nifH2), y4yD (nolW), y4yE (nolB), y4yG (nolU). In addition, the database entry of the homologue to y4yC (nolX) has been corrected to 98% identical to y4yC. Furthermore, the sequence of the ORF y4hB (noeE) has been available to the public since October 1996. Except the 14 ORFs mentioned above, the remaining 402 ORFs are new. 139 of them show no homology to any known ORF/protein. The others exhibit less than 98% amino acid identity to public database entries over their whole length.

[0116] INDUSTRIAL APPLICABILITY

[0117] The present invention provides a detailed analysis of the symbiotic plasmid pNGR234a of Rhizobium sp. NGR234. The plasmid pNGR234a (including any ORFs encoded therein, or any part of the nucleotide sequence of the plasmid, or any proteins expressible from any of said ORFs or any part of said nucleotide sequence) has industrial applicability which can include its use in, inter alia, the following areas:

[0118] (a) the analysis of the structure, organisation or dynamics of other genomes;

[0119] (b) the screening, subcloning, or amplification by PCR of nucleotide sequences;

[0120] (c) gene trapping;

[0121] (d) the identification and classification of organisms and their genetic information;

[0122] (e) the identification and characterisation of nucleotide sequences, amino acid sequences or proteins;

[0123] (f) the transportation of compounds to and from an organism which is host to at least to one of said nucleotide sequences, ORFs or proteins;

[0124] (g) the degradation and/or metabolism of organic, inorganic, natural or xenobiotic substances in a host organism;

[0125] (h) the modification of the host-range, nitrogen fixation abilities, fitness or competitiveness of organisms;

[0126] (i) obtaining a synthetic minimal set of ORFs required for functional Rhizobium-legume symbiosis;

[0127] (j) the modification of the host-range of rhizobia;

[0128] (k) the augmentation of the fitness or competitiveness of Rhizobium sp. NGR234 in the soil and its nodulation efficiency on host plants;

[0129] (l) the introduction of desired phenotype(s) into host plants using said plasmid as a stable shuttle system for foreign DNA encoding said desired phenotype(s); or

[0130] (m) the direct transfer of said plasmid into rhizobia or other microorganisms without using other vectors for mobilization.

[0131] REFERENCES

[0132] Altschul, S. F., G. Warren, W. Miller, E. M. Myers, and D. J. Lipman. 1990. Basic local alignment search tool. J. Mol. Biol. 215: 403-410.

[0133] Appelbaum, E. R., D. V. Thompson, K. Idler and N. Chartrain. 1988. Rhizobium japonicum USDA1 191 has two nodD genes that differ in primary structure and function. J. Bacteriol. 170: 12-20.

[0134] Badenoch-Jones, J., T. A. Holton, C. M. Morrison, K. F. Scott and J. Shine. 1989. Structural and functional analysis of nitrogenase genes from the broad host-range Rhizobium strain ANU240. Gene 77: 141-153.

[0135] Bender, G. L., M. Nayudu, K. K. L. Strange and B. G. Rolfe. 1988. The nodD1 gene from Rhizobium strain NGR234 is a key determinant in the extension of host-range to the non-legume Parasponia. Mol. Plant-Microbe Interact. 1: 259.

[0136] Bodmer, W. F. 1994. The Human Genome Project. Rev. Invest. Clin. (Suppl.) 3-5.

[0137] Broughton, W. J., M. J. Dilworth, and I. K. Passmore. 1972. Base ratio determination using unpurified DNA. Anal. Biochem. 46: 164-172.

[0138] Broughton, W. J., N. Heycke, H. Meyer z. A., and C. E. Pankhurst. 1984. Plasmid-linked nif and “nod” genes in fast growing rhizobia that nodulate Glycine max, Psophocarpus tetragonolobus, and Vigna unguiculata. Proc. Natl. Acad. Sci. USA. 81: 3093-3097.

[0139] Broughton, W. J. C-H. Wong, A. Lewin, U. Samrey, H. Myint, H. Meyer z. A., D. N. Dowling, and R. Simon. 1986. Identification of Rhizobium plasmid sequences involved in recognition of Psophocarpus, Vigna, and other legumes. J. Cell Biol. 102: 1173-1182.

[0140] Buikema, W. J., W. W. Szeto, P. V Lemley, W. H. Orme-Johnson, and F. M. Ausubel. 1985. Nitrogen fixation specific regulatory genes of Klebsiella pneumoniae and Rhizobium meliloti share homology with the general nitrogen regulatory gene ntrC of K. pneumoniae. Nucleic Acids Res. 13: 4539-4555.

[0141] Cami, B. and P. Kourilsky. 1978. Screening of cloned recombinant DNA in bacteria by in situ colony hybridization. Nucleic Acids Res. 5: 2381-2390.

[0142] Craxton, M. 1993. Cosmid sequencing. Methods Mol. Biol. 23: 149-167.

[0143] Dear, S. and R. Staden. 1991. A sequence assembly and editing for efficient management of large projects. Nucleic Acids Res. 19: 3907-3911.

[0144] Davis, E. O. and A. W. B. Johnston. 1990. Regulatory functions of the 3 nodD genes of Rhizobium leguminosarum bv. phaseoli. Mol. Microbiol. 4: 933-941.

[0145] Dower, W. J., J. F. Miller, and C. W. Ragsdale. 1988. High efficiency transformation of E. coli by high voltage electroporation. Nucleic Acids Res. 16: 6127-6145.

[0146] Fellay, R., P. Rochepeau, B. Relić, and W. J. Broughton. 1995. Signals to and emanating from Rhizobium largely control symbiotic specificity. In Pathogenesis and host specificity in plant diseases. Histopathological, biochemical, genetic, and molecular bases (ed. U. S. Singh, R. P. Singh, and K. Kohmoto), Vol. I, pp. 199-220. Pergamon/Elsevier Science Ltd., Oxford, U. K.

[0147] Fickett, J. W. 1982. Recognition of protein coding regions in DNA sequences. Nucleic Acids Res. 10: 5303-5318.

[0148] Fischer, H.-M. 1994. Genetic regulation of nitrogen fixation in Rhizobia. Microbiol. Rev. 58: 352-386.

[0149] Fisher, R. F. and S. R. Long. 1993. Interactions of NodD at the nod box: NodD binds to two distinct sites on the same face of the helix and induces a bend in the DNA. J. Mol. Biol. 233: 336-348.

[0150] Fleischmann, R. D., M. D. Adams, O. White, R. A. Clayton, E. F. Kirkness, A. R. Kerlavage, C. J. Bult, J. F. Tomb, B. A. Dougherty, J. M. Merrick, et al. 1995. Whole-genome random sequencing and assembly of Haemophilus influenzae Rd. Science 269: 496-512.

[0151] Fraser, C. M., J. D. Gocayne, O. White, M. D. Adams, R. A. Clayton, R. D. Fleischmann, C. J. Bult, A. R. Kerlavage, G. Sutton, J. M. Kelley, et al. 1995. The minimal gene complement of Mycoplasma genitalium. Science 270: 397-403.

[0152] Freiberg, C., X. Perret, W. J. Broughton and A. Rosenthal. 1996. Sequencing the 500-kb GC-rich symbiotic replicon of Rhizobium sp. NGR234 using dye terminators and a thermostable sequenase: A beginning. Genome Research, in press.

[0153] Gribskov, M., J. Devereux, and R. R. Burgess. 1984. The codonpreference plot: Graphic analysis of protein coding sequences and prediction of gene expression. Nucleic Acids Res. 12: 539-549.

[0154] Hanahan, D. 1983. Studies on transformation of Escherichia coli with plasmids. J. Mol. Biol. 166: 557-580.

[0155] Hartl, D. L. and M. J. Palazzolo. 1993. Drosophila as a model organism in genome analysis. In Genome research in molecular medicine and virology (ed. K. W. Adolf), pp. 115-129. Academic Press, Orlando, Fla., U.S.A.

[0156] Hiles, I. D., M. P. Gallagher, D. J. Jamieson, and C. F. Higgins, 1987. Molecular characterization of the oligopeptide permease of Salmonella typhimurium. J. Mol. Biol. 195: 125-142.

[0157] Iismaa, S. E., P. M. Ealing, K. F. Scott, and J. M. Watson. 1989. Molecular linkage of the nif/fix and nod gene regions in Rhizobium leguminosarum biovar trifolii. Mol. Microbiol. 3: 1753-1764.

[0158] Levy, J. 1994. Sequencing the yeast genome: An international achievement. Yeast 10: 1689-1706.

[0159] Lewin, A., E. Cervantes, C.-H. Wong and W. J. Broughton. 1990. nodSU, two new nod genes of the broad host range Rhizobium strain NGR234 encode host-specific nodulation of the tropical tree Leucaena leucocephala. Mol. Plant Microbe Interact. 3: 317-326.

[0160] Long, S. R. 1989. Rhizobium-legume nodulation: life together in the underground. Cell 56: 203-214.

[0161] Long, S., J. W. Reed, J. Himawan and G. C. Walker. 1988. Genetic analysis of a cluster of genes required for synthesis of the calcofluor-binding exopolysaccharide of Rhizobium meliloti. J. Bacteriol. 170: 4239-4248.

[0162] Makino, S.-I., I. Uchida, N. Terakado, C. Sasakawa, and M. Yoshikawa. 1989. Molecular characterization and protein analysis of the cap region, which is essential for encapsulation in Bacillus anthracis. J. Bacteriol 171: 722-730.

[0163] Martinez, E., D. Romero, and R. Palacios. 1990. The Rhizobium genome. Crit. Rev. Plant Sci. 9: 59-93.

[0164] Morett, E. and M. Buck. 1988. NifA-dependent in vivo protection demonstrates that the upstream activator sequence of nif promoters is a protein binding site. Proc. Natl. Acad. Sci. USA. 85: 9401-9405.

[0165] Morett, E. and M. Buck. 1989. In vivo studies on the interaction of RNA polymerase-a with the Klebsiella pneumoniae and Rhizobium meliloti nifH promoters: The role of nifA in the formation of an open promoter complex. J. Mol. Biol. 210: 65-77.

[0166] Padmanabhan, S., R.-D. Hirtz, and W. J. Broughton. 1990. Rhizobia in tropical legumes: Cultural characteristics of Bradyrhizobium and Rhizobium sp. Soil Biol. Biochem. 22: 23-28.

[0167] Pearson, W. R. and D. J. Lipman. 1988. Improved tools for biological sequence comparison. Proc. Natl. Acad. Sci. 85: 2444-2448.

[0168] Perego, M., C. F. Higgins, S. R. Pearce, M. P. Gallagher, and J. A. Hoch. 1991. The oligopeptide transport system of Bacillus subtilis plays a role in the initiation of sporulation. Mol. Microbiol. 5: 173-185.

[0169] Perret, X., W. J. Broughton, and S. Brenner. 1991. Canonical-ordered cosmid library of the symbiotic plasmid of Rhizobium species NGR234. Proc. Natl. Acad. Sci. USA. 88: 1923-1927.

[0170] Perret, X., R. Fellay, A. J. Bjourson, J. E. Cooper, S. Brenner, and W. J. Broughton. 1994. Subtraction hybridization and shotgun sequencing: A new approach to identify symbiotic loci. Nuclei Acids Res. 22: 1335-1341.

[0171] Platt, T. 1986. Transcription termination and regulation of gene expression. Annu. Rev. Biochem. 55: 339-372.

[0172] Radloff, R., W. Bauer, and J. Vinograd. 1967. A dye-buoyant-density method for the detection and isolation of closed circular duplex DNA: The closed circular DNA in HELA cells. Proc. Natl. Acad. Sci. USA. 57: 1514-1521.

[0173] Relic, B., X. Perret, M. T. Estrada-Garcia, J. Kopcinska, W. Golinowski, H. B. Krishnan, S. G. Pueppke and W. J. Broughton. 1994. Nod factors of Rhizobium are a key to the legume door. Mol. Microbiol. 13: 171-178.

[0174] Rosenthal, A. and D. S. Charnock-Jones. 1993. Linear amplification sequencing with dye terminators. Methods Mol. Biol. 23: 281-296.

[0175] Sambrook, J., E. F. Fritsch, and T. Maniatis. 1989. Molecular cloning: A laboratory manual, 2nd ed., Cold Spring Harbor Laboratory Press, Cold Spring Harbor, N.Y., U.S.A.

[0176] Shine, J. and L. Dalgarno. 1974. The 3′-terminal sequence of Escherichia coli 16S ribosomal RNA: Complementary to nonsense triplets and ribosome binding sites. Proc Natl. Acad. Sci. 71: 1342-1346.

[0177] Smith, T. F. and M. S. Waterman. 1981. Identification of common molecular subsequences. J. Mol. Biol. 147: 195-197.

[0178] Stanfield, S., L. Ielpi, D. O'Brochta, D. R. Hesinki and G. S. Ditta. 1988. The ndvA gene product of Rhizobium meliloti is required for Beta (1-2) glucan production and has homology to the ATP binding export protein HlyB. J. Bacteriol. 170: 3523-3530.

[0179] Sulston, J, Z. Du, K. Thomas, R. Wilson, L. Hillier, R. Staden, N. Halloran, P. Green, J. Thierry-Mieg, L. Qiu, et al. 1992. The C. elegans genome sequencing project: A beginning. Nature 356: 37-41.

[0180] Tabor, S. and C. C. Richardson. 1995. A single residue in DNA polymerases of the Escherichia coli DNA polymerase I family is critical for distinguishing between deoxy- and dideoxyribonucleotides. Proc. Natl. Acad. Sci. 92: 6339-6343.

[0181] van Rhijn, P. and J. Vanderleyden. 1995. The Rhizobium-plant symbiosis. Microbiol. Rev. 59: 124-142.

[0182] van Slooten, J. C., T. V. Bhuvanasvari, S. Bardin, and J. Stanley. 1992. Two C₄-dicarboxylate transport systems in Rhizobium sp. NGR234: Rhizobial dicarboxylate transport is essential for nitrogen fixation in tropical legume symbioses. Mol. Plant Microbe Interact. 5: 179-186.

[0183] Yanisch-Perron, C., J. Ira, and J. Messing. 1985. Improved M13 phage cloning vectors and host strains: Nucleotide sequences of M13mp18 and pUC19 vectors. Gene 33: 103-119.

[0184] Bairoch A., P. Bucher, and K. Hofmann. 1995. The prosite database, its status in 1995. Nucleic Acids Res., 24 189.

[0185] Borodovsky, M. Y., K. E. Rudd and E. V. Koonin. 1994. Intrinsic and extrinsic approaches for detecting genes in a bacterial genome Nucleic Acids Res. 22: 4756.

[0186] Broughton, W. J., U. Samrey, and J. Stanley. 1987. Ecological genetics of Rhizobium meliloti: symbiotic plasmid transfer in the Medicago sativa rhizosphere FEMS Microbiol Lett. 40: 251.

[0187] Fellay, R., X. Perret, V. Viprey, W. J. Broughton, and S. Brenner. 1995a. Organization of host-inducible transcripts on the symbiotic plasmid of Rhizobium sp. NGR234 Mol. Microbiol 16: 657.

[0188] Freiberg, C., R. Fellay, A. Bairoch, W. J. Broughton, A. Rosenthal, and X. Perret. 1997. Molecular basis of symbiosis between Rhizobium and legumes. Nature, 387: 3q4-401.

[0189] Gray, J. X., M. A. Djordjevic, and B. G. Rolfe. 1990. Two genes that regulate exopolysaccharide production in Rhizobium sp. strain NGR234: DNA sequences and resultant phenotypes J. Bacteriol. 172: 195.

[0190] Hanin, M., S. Jabbouri, D. Quesada-Vincens, C. Freiberg, X. Perret, J.-C. Prome, W. J. Broughton, and R. Fellay. 1996. Sulphatation of Rhizobium sp. NGR234 Nod factors is dependent on noeE, a new host-specificity gene Mol Microbiol, in press.

[0191] Krishnan, H. B., C.-I. Kuo, and S. G. Pueppke. 1995. Elaboration of flavonoid-induced proteins by the nitrogen-fixing soybean symbiont Rhizobium fredii is regulated by both nodD1 and nodD2, and is dependent on the cultivar-specificity locus, nolXWBTUV Microbiology. 141: 2245.

[0192] Morrison, N. A., C. Y. Hau, M. J. Trinick, J. Shine and B. G. Rolfe. 1983. Heat curing of a sym plasmid in a fast-growing Rhizobium sp. that is able to nodulate legumes and the nonlegume Parasponia sp. J. Bacteriol. 153: 427.

[0193] Nakai, K. and M. Kanehisa. 1992. Expert system for predicting protein localization sites in Gram-negative bacteria. PROTEINS: STructure, Functions, and Genetics 11: 95-110.

[0194] Piper, K. R., S. Beck von Bodman, and S. K. Farrand. 1993. Conjugation factor of Agrobacterium tumefaciens regulates Ti plasmid transfer by autoinduction Nature 362: 448.

[0195] Sullivan, J. T., H. N. Patrick, W. L. Lowther, D. B. Scott, and C. W. Ronson. 1995. Nodulating strains of Rhizobium loti arise through chromosomal symbiotic gene transfer in the environment Proc. Natl. Acad. Sci., 92: 8985.

[0196] van Slooten, J. C., E. Cervantes, W. J. Broughton, C.-H. Wong, and J. Stanley. 1990. Sequence and analysis of the rpoN sigma factor gene of Rhizobium sp. strain NGR234 J. Bacteriol. 172: 5563.

[0197] van Slooten, J. C., T. V. Bhuvanaswari, S. Bardin, and J. Stanley. 1992. Two C4-dicarboxylate transport systems in Rhizobium sp. NGR234: rhizobial dicarboxylate transport is essential for nitrogen fixation in tropical legume symbioses Mol. Plant-Microbe Interact. 5: 179.

[0198] Zhang, L-H., P. J. Murphy, A. Kerr, and M. E. Tate. 1993. Agrobacterium conjugation and gene regulation by N-acyl-L-homoserine lactones Nature 362: 446.

The application's sequence listing, which the Patent Office published only in electronic form, follows.

SEQUENCE LISTING (9 sequences)

SEQ ID NO: 1 - DNA, 536165 bp, Rhizobium sp. NGR234
gatctcgattggcagaaccggcaccgcgcgccagctaactacgccatagagcgcgagcaggaagcgcgtgagtacgttgctgttggcggcgccgccgcgcgcgcggatcgcctcgcgcgccttcaccatatgagccgcgtcgacggaatcaccgatcatcttgagcgcgaagtaagacttcacgcttgcgctcatatcgaagggcccgtcatgcaccagcggccagccgccgtgcgcgccttgagtgcggcgcagataatttccgattttggcttcgagcacgacgtcaatgggctcggccaggtaatgacgtagcaggatgtattcggaagggatggtggaatccgcttcaagctcgaacgcccaatggccgtcggcatgacgataagcgagcagcgcctcagtggctgaggcgatgctcatttccagcgcggcgggatcgatggcagtgcgatttccggaatgcttattcactgacttcctgcgtgttcggcagcgtgcaaaaccgtctggatttatcaatcaagtgtttgtctctgaaagagccagatcggcggcacggttacccgaccgcaccgatccctcgatggttgccggcaaaccggttgcggtccagtcgccagcaaggaacaggtttttgcaaccggtcacgggccctggacgtagcgcgttctgctccggggtggcctggaatgtggcccggcgctcacacacgatctgccacggcggcagctcgcctgagatcccaccggcctcgcacacgtcgcgccagatcactcgcacgacctcctcacgcggaatgtcaagcaggcggtcgccattgctaatggtgactgaaagccgctgcggataggcgaacagccactccacgagcccgccgaccacgcccaggatcggatccgcaccgactggcggatcgaagcgaaaatgggcattaacgacggcgcggaattcggtcggggttttcaggccgggcaggagcgtcgcggccgcccgtggcggcacggcgaggatcacggcgtcgtcggggccgaccgctatcttgtcgtcaccgaaatcaagttcgctgatgatctcggccgatttggcaagcttgcgcagtttatggctgaggcggacggtggcgccccgcctctccaggagcttgaccgccggctcgaccagaacggcgctcagtccgtcgcgcgcgactagcggacggcaagcctcgccgcccgcgagcagcgtttcccgtacgatggcaccggcaagccctgccgagccctccggcggatcgcaattcagggcggcgagcagcagcggccgcaccagacgccggtacagcgtaccattgcagggtatagtgtttccgaccagttcatccgcgccggcccataggattggcgcgagcttcaggtagtcccacagcctggtgtcggggacgcgacgcgccttgtggaacacccaggtcggaagcctgccgccgccgagatcgacctgccagcgctgtacggtggagatgtcgacgaagggaaacttggcactcgtcggaccgacaagaccggattccgttccgatcgcacgggcgtagttgcgcacatattggttgcccgatagaaccagatggttgccgttgtcgatggtgagattggttgcggaatcgaaaaaggagcggcatcgaccgccggcctgttgcgtcgcttcatagacatgcaccggcaaacctgcattgctcaactgcacggccgcggaaaggccggagatcccggcgccgataatgtgaacattttttggcatcacaacatcaaggcgtaacggaagagaatggcgcgctttgtgagattggttacacgcaccggttcccggggagccgcaaaaccccttatcagcagcaggtccaagatcgcgcggtaacatttggacatgatggtgggggcgcgtactattctgcgcgggttgcaattcatgatctcgtcggattcggcaaaatgcatcatcgcgcgttgggccagcggtgcgcacgccttgggcagcgccttgtcggcgatgactttatgtgggtcgctgctggtgataccggcgtgatcgaggctttcgcgtggtatatagagccgacccagcccagcatcctcgtctatgtcgcgcaggatgttggtgagttgcagcgcacgaccgaggtgatgcgcaagtgcaatgccatcctcctcgctcaagccgaacacacgcaccgacatccttcccacggcgctggcgacacggtcgcaatagagatccagggttgccattttgggcgcgcggatgtcttgtagtacgtccatttccatgccgtcgacaacggctaggaaatcctctcgcttcagcccgaaggtcgttaccgaggcgagatagtcctttagccgcggcggcggtacacattggtagagcgcgtcaatgtgatcgcgccattgctgaagtgcagcaaggcggtgctcgcgcggttcgtcggagtcggcgatgtcgtcgacctggcggcagaagctgtagatctggaatatcgcctcgcgctgcaccggcgggagggtacgcattcccagatagaacgagctgccaagggccgtagagcggtggttcgcgtgggccgccgcctccgccctcatacgtcgacagtcgtcttgaatcgcgtaccgcggccgaacgcacggcgcgcggcttcgtttgccattgcgccgacgccatggagcagcagctcaagcggcgacagatgcacgcgctcccttagaggatcgcgcatcttcagcatcgacacgatcttatcggcaaaagacagtatgacggagacctcgaaccggaggcgaaagtccttcacctgcgacaccagcgctccgcccccgttgagcagcacctcggccttcgctgcgagagagcgcaggcattgtagcatctgcaacgaggattttgcggcgcccagctcttcgatggaggcgccgctggctgaaagcgcatcgcgcggaatatagacgcgattgagattaaggaaatccttgccgcaatcctgcaggtggttacagacctgcagtcccgcgcacaacacatccgatgccggccacgtcgcggcactttcgccgtggacgtcgagcacaaatcggccgaccggcatcgccgagtatcggcaataatcgatcacctcgtcccagttctcgtaacgctgcttagtcacgtccattcggaaggcggtgagcagatcgagtgcatgacgcggcggcatgccgcgtcggtcaagcgcagtgcgtaggtgtacagcttctgctcgcgtttcgcccttgccgagcagctcggcttccaggaggtcgaggtacagaagcttctcgtctggcgcgagcgtcgcgtgatcggcaatgtcatcggccatgcggacgaatcggtagaaggcaagaatcagcgctcggtgccgcggatggataatccacgacgcaacggggaaatttttctcgcggtgcattgcgtccgacctggggccgctgccgctcgtcatttagcaccatcgtcggttttgcaggcgttggatgctgctgaaatgcagtcgggcccccgaataaatcgtacaatccacgaaggtacggcggcggccaaagacgttatcgaccggcgcgcgtttttatccccgagaattatccgatgcgaatctgtttttcgagtatactgattcgttctgacgaattctttgctgaaagcgtcggatgagactatatcccagtagctaaaggcgattcgactaccgcgcattatgaatacaccacatccctgccatgcaaacatatcccaccactcaattattacgcggtcatcttcttcgtagatgaactccggagcgcaaatcctctccgcaatggcgcgatttggtcgaaaaatcttttggattgccgcgcgtcctatcacggggcgctgcatcggccagaggctcattgcattttcgtggtacagctcagccaaagcgatcgcatcacccttattgaatcgtcgaatccactcttcgaccgtcccgcgcgcgctcattgaaatgctcctttctcaagacctttgctaccatcggtccgtcaggatccggcattttccagctgtcgattcgatagccagagggatatcgcccgactcgatccccaaacataatgaggcacaaagcggcgcacagcgattgctgtgcgagcataagcgccgcgtttcgttcgttcagtcattgcaggtgatgtccacggtgatcactcgatgccgcttctaaaagcgatcggtgcaccttcaacgaaagtcgcggagccccacgcagcgtggagaaactcgcgtatgggtcactggacgggttgtggccgtgttttttgtaggaaaccgcgactttggcaaagctcgaactcaccctctcagttgcgcgcgcgacgcccttttcaggcacggcaccggcccacgctagtgttgctgaaatacaaccgtgatccgagtggaaaagcggtccaccggaagagctaaatcagatgtatttttcaccagagtttcacatagtctcgctttattgaaatccattttttcaatgacataaatctatacggtagattcacagccgagtatgcttcagccacaggcggttctgcagtcagaacgtcgcggttctcaatttgaggagttatcagtgatgtttaagacagaacgaggctgcgatcgtgaaggaatggatgagcgttttttcgagtgcggtgtcgcgcgagaccggtgcgccactggcagacagtgtaggtcatcgctgctccggtcaatgtcacggcgaagaccggcacttgtcctggggccggcggcgcctatccactgggaacaacggcggtcgagcgggcctgtttctacctgccaatgcgagcctgatcacccgtaccggcgctgtagtcggctccgagtgcagcgttcaggcaggcggtatattttcacggccccccgtccgccgtcgattacgatgctgcatcttcaggcggcacaaatcttgcgccgacgaaccgcgaactcgtcgacgccgttgatgagcgggtaggggtgatcgcggaagagaccgggcggccagacgtttgcggaacgcacaagcgactcgcccgtgacccgcaggccgatggtgtgggagggagcggcgccgtggggcgtctttgcaaaccggtgtcagtgccagagtcgcgacccgccttaattatcagccacattgctgacaaacgattcataggatttggccagtcccagctcgagcgaggtcttcgggcgccaacccatcgacacgagtctttcgctagataaaagctttcgtggcgttccgtccggcttggatgtgtcgaagactatatcgcctttaaaaccaacaacacggcagacgatgtgggctagttcaatgatacttatttcccccccggagcctatgttaatgtgttccgtttcggaataatgcttaagtaggaagaccagggcgtcggagcagtcttcactgtacaaaaagtctcgagtaggtgtgccgcttccccatatagacaagcacccaaggtctttaatctttgcctcatgtgctttgcgtattaaggcagggacgacgtggctggagttaagatcgaacttatcgcgtgggccatagagatttgtcggcatggctgatatgaagtttgcgccgtattgcttacgatacgcttgacacaacttaatgccggcgattttggcgatcgcataccactcgttggtcggctcaagtggtccggttaatagagcctcttcccttatgggctgcgccgcatacttcggatatatgcaactcgatccaaggaaaagaagcttttcaacgccactgcggaaggagccctcaatgacattagcctccatgataaggttttgatagatgaagtcagcgggcatagtatcatttgccaggatcccacccaccttcgctgccgccattatgaccgcgtgcggcttttcctttaatagaaatttctcaacttcctcttgccgcgtcagatcaagcttttgcctatctgcaacgatgacttcgcaatcctcggaggcaagcgatcgaattatggcgctgccgaccatacctttgtgtcctgcgacccaaatacgctttccgtctagcaaatacatcggcatctcgcctcttactgtcgggtgcccctcaaataagagagatcttcccttaccatttcgcaagcaagatctctcacacttgtctcgtgcctccagcccaaaacctgccgggccttggtggcatcgcctaaaagtaaatctacttccgtgggcctgaaatagcgcggatccaccgcaacgacgcatctgcctgtcgcggcgtctatgcccctttcttcaatgccttctcccacccattcaatcgtcattccggtttcctcgaaggcccattcgacaaacgtgcgaaccgatgttgtcaccccggtagccaggacatagtcgcctggtctatcctgttgacacatcatccacatgccccgcacatactcacgggcatgtccccagtcacgttgagcatctagatttccaagataaaggacctcttgtttacctagactgattgccgctgcagcccgggtgatcttgcgagtcacgaacgtctccccacgaagcggactttcgtggttgaaaagaataccgttggaggcatgcatgccgtaagcctctctataatttacgacaatccagtacgcgtacagctttgcggccgcgtagggtgaacgcgggtagaatggcgtcttttcgttttgggggctctcttgagccagcccatatagctctgaagtcgatgcctgataaaagcgagtccgattggtcagcccaagaatccgaatagcttccagcatgcgcaatgtaccaattgcatcggcgtttgcagtgtactcgggggtttcgaagcttacctgaacgtggctttgcgctgcaaggttgtagatctcatgcggctgggtttgctgaacaatgcgcagcaaattggtcgaatccgtcatatccccatagtggagaaaaaatctcgcttcaggatcgtgacgttcttgataaatgtgctctatccgttgagtgttgaatgatgacgaacgacgctttatgccgtgaacaatatagccttcgtccaacagcagttcagcaagataagccccatcctgacccgttacgccagatattaaagctactttccggtctgtcactttgtcgaatctccagtgatattcctgcgggagagggcgtgcgctagggcagctggtgtgaaggaaatcgtcgtgcttcggcgacagagcgggcctatggaggcattgcggttttcaaagcagtattgccggagacgtgcgggccggggcaactgggcatgaggcgctcgtgtcccttggagcgcgcccaagtttctccatgactgctcttcaccacgcctagaattgaggtgacgattttcattcaagaggcggtatttgttgaagatctttcgatcacgaccaggcgactaggatcgttcagatcaaactcaataacccttgggacagaaaggcgtgcgtaacgtgtaaaggcgcttgtcggaggaaaccgaatgacggtgtcgcaaagcccaagaagatacatctcgacgagggcggaaattccgccctcaaccccgagatctgcgctgtgtaatgggccagactgatccgctcggaaacttttcgggatcgtgagaagatcggggaacctactcgacacctggtccaatacccgcgcgctatcggtgcacaaaatcacccgcacaggcttcgggtggggcaacgctttggcagcattaatggcagtgcacacttgatgcacggcaaggtccggatcggcccagtagggtgcatggtccataacgtcttcgccgttaccatgccgaacatgaaccccgatcgcactgtacccatagaagtgctcctgatagatagcgtctatgcgagcctgaatttcagcccgaggcttgacactgcagaaaatctgccgctctgcctcctcgtcgcagcgccacatcaaacacgcatcacacactaccgtgttggcctcgacatcatcttgggcctggaaaagttcatcgagttcgtctcgctctcgaaaaacctgagcatctgggcggtaaacacattcaatcgcaggtttattccaccaatttgggaagaatggtcctgggaaggaaaactcgttgacccggttatcgcaaataaaagggacacctgcgatatccttgattggttcaaaaaacaccggaaaggcgtttgtgaagggctgatcaaggtagcaggacccgcgccagtcaacggctaacgttcgcgccgtcctttgggcgtagcgccaagcggccgccagcgaccacagacagtcaccgaaaccagtacgtctccgagagaggacatatcgattgtacaatgctgcccgtccttagtgccgccgctctgacttactgtcttctacggatttccaatcaattcagagcttcctaatggagttcggcaacatcagtaaaatttatattttgaatggcaaccatccacatattggatgtaaaggggacgtgtctttcagggcttatcttcacgttaggtggcgaaccatcgacgctagcggtaacagatctgcatatcagcaaagcctaacttacaccattgaactgttaaggaccgccagtccctgagccagcaaatgttcggcagcatctgggtcgtctgcctcgacgtagcaacgcagttcaggcgcatttcctgaagggcggatgtgcaggatacggccgccttcaaatgtcaggcgcaggccatccacgtcgtccgtgcccgccacgcgaccgatccggctgaataaatgggaaacattagcttttgacgctttcaagaatgccactagggcgtcgctcctatcgaacggatagttctcgatccggccggacaaagcgactggcaaacgatgcatcgcgacgatccccgagaggggagttttggcctctactgccatgtggagcgctgcaatgatgggaaggacgcagtcccgggtcggcaaggcgggaagcgacgcgcctccgaacgagaagttcgaacctagcatgacgccaccgttggcctcgaagcccatcacccgctgcttgccacgggcaaccgcctcagtcatggctgcaatgacgtaaggtgagccaacgcgggtacgcaccacctcgacgccactcgccgcctcgatcccggagttgctggttattggcgtagcaataagcttggcctccagcagccttgcgcaaataagaccgagcagatcaccgcgcaatggagttcccgtttcatccgttagcaggggccgatcggcatctgcgtcggacgatacaatggcgtcaaaggcgaactccttcgcccaggcagcgagcatcttacatgtcgccgccgaaatagcttccgtgtcaacagggatgaagacctcagatcggcctaccggtacgacatttgcgccatgaccttccaagatggtggtcaaaatatcgcgggcaacgctgctgtgctgatataagccgatctttagccccttaaggcccgattttggaagcagcgtttcgtaacgttggatatagaagtcagttgcttcgctggagtggtcggcgccgcggccacactcaaccctggttgcatctgcatcggctgaaagctgctccgccaacgccgtaatcgcctgctcgtcggccttgttgatctcaccgtcaggcagatagaacttaatgccgtttcggtcggccggaatatgcgagcctgtgatcatgagtgatgctgcaccgagttttcggccgtacaatgcaagcgctggtgtcggcagccctccgcagtcgaccggcaccattcccgcccgggcgagcgccgccatgcagatagcggcgatttccgaacttgaatcgcggaagtcgcgaccgaccaatacggtcgcccctggcgcgacccgtcctctgtcgaggagcatcctcgaaaaggctgtagcatagagcgccgacacactacccacgagttctgttgccaacccgcgcagaccacttgtgccgaatttgggacccattaactagcctttttttgccgggcagcgttcagcaggtagtcgacgccaccggggcaagccgaatgaattcgcatccactaatgagattgcttcgctctcgccacactgttatgaagcttccatcaaacgcaatcaaaaatgacaccatgcttccaaagattatcccagctatcatggcagggggtaggggcacaaggctctggcctctgtcacgcgcaactgccgcaaaacagtttctaaagctaatcggcgaggaaacgctctttcaagacacgcttaagcgcgtttccgatgccaaagtttatggagcaccactcgtcatcacaaatgaggaatttcgcttcctggttgccgaacaggcgcgcgagctcggggtcacgctttccagcatagtacttgagccggtgccgcgcaacacggcagccgcagtagccgtcgccgcccggatcgtggctgatcggtttggtgaggacgcgctattgcttgtgctgccgtcggaccacgcgattacggtagacgatacttacaagaaatgcgtgcgctccgcctgcatcgccgcagcggagggcaagctcgtgacgttcggtattcaacccacttggccagcaacaggatacggatacatcgaacgtggcacttaccttggcaaggacgtccatgcggttcaatgttttgtcgagaaaccaagtctcgaaaaggcggcggctcttttggagaccggcaattactattggaactctgggatgttccttttccaggcggccagcattatcgccgaacttgaggaacatgcacccgacgtgttgtcggcggtgcacgccgcggtcaggggctcaacggtcgacgccgattttatacgacttgccccggagagtttcagccaagcgccatccatctcgatcgactatgcactgatggagaaaaccgcaaacgccgccgtggtctgctcggattttgcttggtcggatctcggtagttgggatgctgtatggaagaatgaggagcagaatgctgatggtaacgtgctcaagggcaatgttacggcctgcaacacgaagaattcgcttgtgttgtcgcataccgcgcatctcgctgtacaggggatggatggagttgcagtcatcgctagcgaggacgcagtcttcgtcgggcgactggaggaggcccatgagatcggaaacttggtgaagcgcctcgccgcggacgaaaatacggcacgtcttacggaattgcacccaactttgatacggccatggggcggctacaccactatgcttaacggcgatcgcttccaagtaaggcggttgttcgtacgccctgggaagatgctttctctccacaagcattttcatcgatcagagcactggatctgcgtgaagggcaccgcagaagtgacaatcgaggatcgagtaacgatcctgcacgagaaccagtcaatctacatccccgagggggcgatacatcgcttgggcaaccctggcaagatcatgctggagttggtcgagattcaaactggtgcctacctgggcgaggacgatatcatccgcgtcgcagacgaatcgagaaatgaaatgccagattcgaggcgtacgggcccatagggatagcgtgccctttgcgcagtccggcaccttcgcacgcattacggtatctggagcgaggacgtggtggcaccatcggcaagcgttgcaccggcggccgcggacgggtctgacgacatgcgatggataccgccctctgcgtcgacacgatcgtagatgcgtgttctcctccgtgggcccggcacgatcgttctcctgcgcaacgcatacctcgcgacgaggtaggccgaaaaatccggctttcttcgcgcgcagcatttcgagacgacctttctcgacgggcagatcgcccggcgtctgcgacccgtccggcttctttttctttgagcggtttctcgcagcagcaccgcttgcacgcggctccattccggctttttttaccgacagatcagctatgcgcttgaagcgctgcttgccgtcccgtctggcggaaggcccgcgaggaacggcgaaaaggcggcgccgaagcccctgcattgttagtggcaaggctgttgcggtgggcgttgacggtttcgctccggctcgatccctacggtcgaaaagacgaaatggcaggagcggtcggccgttttgccacaaagcctgttcttcaggaggcgcatgcaagagggcgggcgacggcatgaagccgtgaatgcacttgacttcagattaattaagcgttttctaacgatttgcataattgatcgttcggatgacaaccatccgcactgtggattcgccagaacatgcgttttaagggccttgatctcaatctcctcgttgcgctcgacgcactgatgaccgaacgcaaactcacggccgctgcacgcagcatcaacctgagccagccggcgatgagcgcagccatcacccggcttcggacctatttccgcgacgagctatttaccatgaatggtcgcgaacttgtaccaactccgcgagcagaagcgctcgcacccgcagtccgcgaagccctgctgcacatccatctctccatcatttcatgggatccgttcaacccagcgcagtcagatcgcagtttcaggatcattctttccgacttcatgacgctaatgtttcttgaaagggttgtggtgagagtggcgcgggaagcgcccgccgtcagtttcgagttgctgccgttttccgatgagccagatgagcttctccggcgtggtgatgtcgatttcctgatcctgccagaaatgttcatgtcgcacacgcatcccagagcgaagctgttcgatgagagattcgtgtgcgtgagctgcccaacgaaccagaagctaccgccgcagctctccatcgacaactatgtatcaatggggcatgttgcggcccaattcgggaagcagcggccttccgtggaggaatggctattgcgcgagcacggattgcgaagacgggtcgaagtcgccgtgccgggttttaccatgatcccgtcttttttgtcgggcactgaccgcatagcgaccctcccgttacgactggcgatgcacttcgcaaaagccattcccctgcggatcaccgaacttccgcaacccatttttcccgcgttcaccgaggctgtccagtggcccgcgcctcacagcagtgatccggccagtctctggatgcgcgagatatttctacaggaggcgtctcgcgttgaatttcaatccgaaacttcggcgcatgctctatctaaagccgacggcgcaattcgccacccttgagcccgcaactgcacggtcggctcagggtcgagcagtttggctgcaggttgcggcctaccagaggggctcgcacggcccgagcgtaccgcatgccacactccgaccattttcggcctatgcgcagcattagctcttcagcttcagcagccgggagaccatctcattcagcgtgatatccttcgatacctcgatcaaaccgcgcatgggcattaaggcgaggttcctactgtccgccatgctacaagtcactcgcaagttgcccttccggacgctcccaatccagccaatttgcggtcggaacgccaatccaaccgcctcgcagcagcctccgccgacagcccgttccgtcttcgatactcggctctgaagatcgtgactcagtgctcttccattgcctcctgattctaagaaaagaaccgagactgcggacacggagatgcctcaattgagttgctcactttggagttgagctgtatcaaacgggtgccctcgacaaaggccatattcgatatagcggatcccagtaaatcattggtgaaacgatccttcaccaggagtaagtgtgttgagtgttgaccctgagaagaaaagagccaaagcgaacgctgtggatatttacgtcggccgtcgaattcgccagaggcgacgatggcagaatatgtcccaagcggccctcggagaagctatcggggtgacgtttcagcaggtgcaaaaatatgaaaagggctcgaaccgggtaggtgcgggccgacttcagcagatatctgatgcactggaagtgcacccttcctatttttttgaggacatgcctgacgacactcagtcgatagggcagggcgcccctaatcaggcctatatcccgcccgaagtgattgagttcgctgcaagcgacgaaggggtcgagctcatccgggcgttctcccgtgtcggcaatctcaacgtgcgctgtcgaatcgtgaagctgctcaagtctctcggcgaacacgactggtaagcatgaattcgcccatttctgagtcgaacgcggctacgctctcggaatgaaatcaaccgtaagtgacatcgccatgggacgcttgcattgactctgtagctcattgagttcaaatcatacaagtgagctaggggaggaaatcacagtggctgacgagagtaacacaggaccagttgccgcggctgaggcggttgccgaaacgcaagcaccagctggcaaaaggaagagttcgtcgcggcgtcaaagaacggctgccggacaagttgcggaatcaaagacgactgctaagcctaagagatatagcgagacagaaagagctgacaagctcaatctgatcgaggccgaagtggctcaaggcaatagcaccctaaaggacgcgatcaagagcgccggcatatcggagcaaacctactacgtgtggaagaaatctgctaagcctgccgatcgaaaaccagaggagtctgtggtggccggcgatgaccttgccgatctcattcaactcgataaggaaaacttgaggcttcgcaaccttttgtcggacaaactgcgtgcggaaaacgccgaactgcgcaagagacttgggctggattagttcaagagtagcctctcaaggctgtggtaaggcgccctgccggcttccgaaagggacggcgtgcctagccttacggccacttgcatcgagtccgaaatggcggtatttggccgaatggtaaaggaatgtcgtggcgcgttttggcgctgatgagtcgtggattgcttgcgagatacatatgaaaacaccaccacggaggtttattgtcgaattcaagcaagcacggcggcgatcaaaggaacgaacgaattcagtctggggaaacacggaccttaaggctttgacccgcgaagtggaagagatggctccgcatttgttcaacttaacggaagagccagtatcccctaacgtagcctacggtccgccggccagcccgaatgcagagtttctcattgcagacaaagagaatatcgggcttgggccagaagccgtgacaccggccgaaggttcggaaaacgcgttctcggggctgttgcaggagacgccaccggtctcccacacccgaacaaactccaaacagcgcatttcgcgaaagctacccgagcggttgtcattggacgtgcgtgagaatgtagaacgcccgatttctcgcggtgaattggccactctcgaagcagaaaacaagcgcctcaaaaggctgctcgctgaacggatccttacccaaaacttgcaactcaagaagatgcttgatcggtttaacctcaattgacgatgtcgcatccgcgcgaaagtcttaggaatctcttgggggccggcgttttagcaatcgctgatagctcttcaatcccacctcaatgacacagttcaggaccttcctccatgtatctagccatagcacgccaaccgaatatattcaaacaaacctgagcctacggcagaattaatggttttttaatagacttggtagctgcggattaaaattatgttttgacatatcctcgatcggtgttaatccactaaatgagaagtgtcgtcgcagataaatactttgacgaaattccagcttgggttgtgattcttccctgttgctttgagccgtcagccagctcagcgccttggtggcggcttcccatcacgacttgagccttgatgttgcggcggagcctggctcctgtgcaatgaccgtccagtttcaagaggcaagtgagttcagcggcattttctcgcacgtttcctcctgaaacgtcgttttgggatatgttgctaagatccgataggagaagaagatgacagaaaccacgctcggtgcgagcaacgaacttttggcagaactgacggcagaaatcgtagccgcctatgtcagcacccacgtggttccgggtgccgagcttccgacgcttatcgctgacgttcattcagcgctcaacaatgccactgctcccgcgccggtgattgctcccattgagaagccgaagccagcggtctcgatccgcaagtctgtgcaggacgatcagatcacctgcctcgaatgcggcggcgccttcaagtcgctgaagcgccacttgatgacccaccacaatctgtcgccggaagattatcgcgaaaagtgggacctacccgcggactacccgatggtcgcgcccgcttatgcggaagcccgctcgcgtctggccaaggagataggcctcggcgagcgccgcaagcgtcgtggtaagtagaacgttatcgccggcggcgatcgctgccagctacgcgccacgcctttaatttgcgcgaaatgctatgcagaatgcggtgtttcggccgcaccttccagatgcacggcgtgattgacgaatgttgaccccgaacgaaagcttggacatatgtagatttcacagcttacgcttaaatccagcgatgacgagacggtgcgccgcttcaaggttttcattaatcttgtcgttggcgaagccgccaagttcaaccgtctcgatccggaggtccatcttcgagatatcctcacgcgcatcgccggccatccgatcaacaggcttgccgaatggttaccgcggagcatgcggcatcagggtcgaccatggccgggcctgccaacacgacactcatgcgcagcgcgcctgcggccttcctcggtggcggcgtcatcggcccgcctccgaagagccggtcagcttgacgacatcgacgaacttgcgtcgcgcgtgagcaaggcagaacgccagccgcatgggggcgacattgctctctcccatcacgcgcgccgacgcgggcgcttgcacaatgacgctttcaccggcccggcatgcatagcttggccggatcgtctgctttacccggacaaccgccggcacgatgtcgagcgcctcactgacgtccgtgccgacgcaatgaagctcgaacgagcagcacgggcaaatcttgctctccggctcgatgagctcttcataccgtgggaggtgcctgggtaaacggccgatgttgcgcgacggtgaccgtcgctcctgttttggcccttcagccacgggtgcaacatcgtcattggccgccgcgggaatgtcggtgagatcgccaaggtcaagcgtcgcctgcgtcgggtcgatcgccgtcatcttctccgatttcggcccaaagagctgctgctccaggaaggcaacgcgcgccttgaggtcggcgttctctgcatcaagcgagagaatgatccggctcaattgcgcggcatcctgaggtaaagagtcgggtcaaagcggcatggcagaccctagcacatgatcctgaatcttcaagcaaatccaataggatcagcccgctttcgtcggccgctttacgacgtttcgcttgcccgagtccagtcgataccggtcagcaaaaaatttgttcggccttgaaatgtacgttcgtctaacgtacagttggcttaaacgacatgaaggagccggtcatgcgagcaatcaaggacgtcacgattgacatcgatgagccgaacaccgttcgaatgaacttccgtacgaaggagcgcgtgaagaggacgatccagcgtgccgcggcactttccggcctcgacgattctgcgttcacgatcaacgctgcctaccagtctgccattgccacgatcgcggcgcatgaggcgaccttgttgcagacaacggactaccaggcgtttttcgacgctttggataatccgcccaaaccgaccgatcggctgagagacgcgttcaagcgttatagcgagaccgtagtctctaagtaatggcaaataccggcgccgcaaaacgcataatcgagccgctcgatcccaaccggcatgatcgggcggcttttttttgtggaatcatccaggtcgacaacttcttcaagaaaacggcgaacaagctatcgaaagcagacaaccttcgtgtctatgtgatgaccgaagacgatggcacaacggttatagggttctacgccatcaacagccactcgatcagctatgctgatctgccggaacgcttttcccgcacccggccgggacacggctcgataccggccgcctatatctccatgatcggtcgcgatcagcgatataggggtggcggttacggcggcgatctgcttaccgattgcctgcaaaggatcgccggaattgctgaccagattgggatcgccgtcgttcttctcgatgtccttgtttgcggtgacgaagaaaagacgagccggcgtgtcgcgctttacagcgaatatggctttcaacctttgccgtcaatgccgcttcggatgttcctgccgatcgcgacgatcaggagcctaatgggctaacgcgcattcggtgcgcgatgcacgcatttaattaagcgcaaaaagcaacagaaacaaaaccgctctgctgttccataagatagattatgcgatcattttttgtagcggcattttagagatgcgacatatgagccagttagagatgcgacggtcgtcgcctcttgggatgctggtcaaacgtcaacgtttggaaggaagactggcgacgggaagcgtggttgagaccatgagcgttcggagtcgtcatgtcttgtttgatcaccatgtcgcagaaggaattgcatcgtcttgaactgatccaacggattcgcggccgcagcctgaccgtcgtcgaggcggccgcgttgcttcgtctcagccgcagtcaggtgcaccggttgttgcaggcctatgacttggccggcgccgacggtctggtctcgaagaagcgcggccgtccgagcaaccggcgtcacagcgaggatttccgcaacctggtgctcgacctggtgcgtgagcattacctggattttggaccaaccctggcggccgagaagctgatcgaacgccaccggattgccgtcagcaaggagacgctgcgccaatggatgatggaagccggcatctgggtgtcgcgacgcgagcgcaagaagcgggtcttccagccgcgcggccggcgcgattgtttcggcgaactcgttcagatcgatggctcgcttcattggtggttcgagaaccgcggtcccaaatgcgccctgctcgtctatatcgacgatgccaccggcaagctcttgcatctgcggttcgccggatcggagaacaccttcgactatctgcacgcgacgaaggcctacttgcagcaatggggaaagccgatcgccttctacagcgacaagcatggcatcttccgcaccacccatgcttccaagaaggacagaaccagtggcctgacgcagttcggccgggctctttatgagctcaacatcgacatcatctgcgccaataccccgcaggccaaggagcggacatcacgatgcaccttgttggagtggttgagcgacaattaatctgggttgacggccaccatatcgactgccggcgcctttttcgagtctgacgttgcccggcggttcgtacaagtatcgatggttgctggcgtatcgatgacgcttgagagtgcctttgcgcccgagttggtgaacggtcgattcgcatacgccgagctgctgggctacttcctcgccggtgagcatgccgccctcgcgcagccgttcgtaccggctcttcaaaccataggtgcggcgcacgagcatgaccttcttcggcgtgaagggttcgccgcgccagttgcgatgcccgagttcgttgagacgagcggcgatctgccggtcgttggtggcctccagcagctcgttgatcaacgccacgacctgtgccggcgtcttgcgtatcaccgacataggccgaggtctggccaccgacaggctctgcgtgcgcccgccgcgccaacggatgttgatgttgacctcatcgtcgacgagcagcgtcacgtcttcgatgagaaggccgagcatgcgcttgcgttcgacggcaccggtgcgctcgtcgttccagatgcgcgggaaatcggcggtcagcgccctgatgcgctgctgcgctggctcgtccagcagcgagtggtcggcctcgttctggcgctcgtgctcgcgctggagtgcgtcgaggtcgcgcagccgtgcgttccagtcggcttccagcgcgtcggcgaccaggcggttgtccggatcgaccttcaggtagcgccggcgggccagttcagcctcatagcgggcgcgttgcagctgcgtgccgcgcagcgccgcggcctgctccacgcgctgggtgatctcctgctgcacggcaagcgcgacatcgatcgctgccggcgccattacctccagcagtagcgcgctcaccgcctcgtcgaccggagcaccgcgcacccattggcagtgtttgccggcgtgtcgcacgacggcttcgttgcagacgtaatatgggcgcagccgcccctcgaacggctcgtaatggacccgcatgcgtgcaccgcagcggccgcacagcagccgtccctgcaacaggccgctgccctggcggggcatgcgtccacgcaggccgggtgaaaaaccggtggcgttctgttccagggctgcctgattgcgttcgtattcggcccaggaaatgtagccgtcgtgggcgtcgggaatcagtacctgccagtcggatctcgccacgcgcagttgcacgggcttcagcttggcattgtaggcggtgcgcgtgcgtccataggcgaaggcgccggcatagcgcgggttgtgcaagatctggagcacgcgggaatggtcgatctcgttccacaggacgtcgcccttgccgatgccgcgacggatacgccgcggaaagaggatcttctcgccccgcaggcggcgcacgacggcgcaggccgagccggtctggcggaaagtatcgaacaggagccgcaccgtgtcctggatctgtcggtcgggatcgagcacgacccgcgcgtcaggggtgtagaccaacccgatcggcagcggcatctcgagttcgccgcggcgcgccttgttgagaatgccgccttgcagccgcgacttcaggatgtgcagttcggcctcgctcatcgtgcccttcaggccgagcagcatgcggtcgttgaaataggccggatcatagacgccgtcctcgtccatgatgagcgtgcgcgacaaggcggccagctcaaggagacggtgccagtcggcattgttgcgtgccaggcgcgacacttccagccccagcacgatccctgcatgtcccatcgccacttcgctcaccaggtgctggaagccgtcgcggtcctgcgactgcgcgccggagaggccgaggtcgctatcgatgacgtggacacgttcgatcggccagcccagcgccacggcgcgatcgcgcagggcgtattgccgcttggtgctctcggtgttctcgaacacctgacgaagcgaggactgacgcacgtagaggaatgcatcacgccgcagatggtcggcgtcaacctttatggcgatgtcagtagacatggttccctcgggtctctgctgccagcaccatgttggcgagcatgtgcacgagctggcgatcgtgcactgcgaccgaagccgtaggccgtgattccagccgccgatgcgtcggcgggggaggctgcgcgatcagcaccgccagcccttgccaaaggccgtggaaaacgatggcgcccatgtccttggcgcaggcctgaccgcaaaggacggcggtgcgcagcgtctcgtagaaatccttgcagctgcgcggtagcaccggggtgcgtgcatggggctcaccgtttttttttacgggcgatcgcgcgttcgatgctgcggggatggacactgatgccgagcgtcgaatgcagcagttctgccagggagcgcgcctgcagcggggcgcccgcatgctggttctgctcgatgagctgcatgacctcgtcggtgagtttgtgggccgactttggccctcgggtgcgcggcagcaggccggcaatgccgtcgcgttcgaacgcggcctcggcctgatagtaggttggccgcgacagaccgaaaagcgcggcggcatcggccttgttgacgccatcctcctggacgtgacgcagcatctcgtacttcacctgcacgagatcgagaggatcgaagaaggtggactcacgaaaccagggtgcacggacggcttcgggccgcgcattgagtgctccgagctcgcgcagtcgctcacgtttggtctcgttgggcatggcataacctcttcctagtggtgtaaatcaaattacgcctcgatagagaacgtgtcaacctaacgacgccgggcgatatggctgtttatgctgcatataactacaatgtagaggcaattatcgctgtgagcgcccgtatgattcggcataattagatttacataatcggcataaattgcctgacacgcattcagccgccatggctgcgctcgatttgctcgatcaatgcggctagggttgccagatcatctggacgcacgaacgacctaccggccgcgatctgaatgaaaacatcgggtgcagcgacgtccgtccatgacgcaagcagcgagcgaagccgcccatccgcgtcgtagaacatgacgcgatcctcgccccagttctgcttgcgtgtcgacaacacgaagcgctggccgcgccacggatggaacgggtgcgtgacctcgaactctatacgcacttgagtgtcagtacgaactgcagtcctggacttgaaagaaggggcgcgtcgagcgcgccaaccagacgctgcaggatcggcttgtcaaggaactgcggctgcgcggcatcgacacgatcgcggcggccaatgcctatgcgccggaattcatggccgacttcaatcgtcggtttggcaaggcgccgcgcaatccgaaggacatgcatcggccgtttgccgcgcatgagaacctcgatggcgccatgtgccgcaaggagatccgcaagctgtcgcagtcgctgacgctgcgctatgacaaggtgatgttcatcctcgatccgaccgacctcgccacggcgctcgccggcaagaaggtcattgtctgcgactatcccgacggtcgcctcgaggtcacccatgaggggacgtccctgccctacaggaccttcgacacgctgcgctcggtgcaccgctgcgaggtggttgagaacaagcgccttgatgacatgctggcgctggtcgccgagatgcaggccggacgagagcaacagcgcagcaagggcgggccgcgccgcaccggccagacggaccatatgttcggcattcgcgacggcagccagagcaatggctatcaaaagcgcggcaccaagcctggccggaagacggattttaccaaggatccggtggtcatcgccaagcggcagcaagcccttgcgcagctgaaagcggcggagtgatcggggtgtcaaagctgaagtttatcttgcggctggagccatccgccgccgaccggcctgcgcaaccctgaccagctccacccggccggcggctcgcgtctgcgtactttgtaaatatatcaacttgcaaacgcagtactaaggaataggatgatgtcgcgtttctaagttgattactttgtctcatctttaaatagctgtgacattttttgtagccgcaaagttaaagtgtcctgttcctgcaaagtaagaatgtcactctccccgcgttttgatggcgtgggagattgcggatgggattgattgcgatgagcgagcgcgacctgcagcggattgaggttttgtcgaaggtgatcgacggccgcatgacgatggtgtcggcggcgcatgtcctgggcttaagcacgcgccaggtgcgtcggctgctggatcggatcagcgctggcggtgcggcgtcgatccgccacaaggcgatcggtcgcccatcgaacaatcggatttgcgacggcgtgcgcgattatgccatggcgatcgtgcgcgagcgctatgcggatttcggtccgacgctggcggctgagaagctagcggagcttgatggcctgacggtgtcgcgcgagaccttgcgccaatggatggcggacgccggtctgtggctgtcgcgcaagcagcggcggacgtttcatcagccgcggttgcggcgcgaggcctatggcgaactggtgcagatcgacggttccgagcatcgctggttcgaggatcgcggtgacccctgttcattgctggtgttcatcgatgacgcgaccggcaagctgatgcagttgcgcttcgtacgatcggaaagcgcgtttacgtatttcgaggcgctggagctctatctgaaggcgcatggtgctccggtcgccttctattccgacaagcattcggtgttccgggtggcgaagaaggacgccaagggcggccagggcatgacccagttcgggcgtgcactttgcgagttaaacatcgagattctttgcgcaaactcgagccaagccaagggccgagtcgagcggatgaaccggacgctacaggaccggttgatcaaggatctgcgcctggagggcatctgcggcatggacgacggcaacgctttcctgcctcggttcatggagcgctataaccggcaattcgccattacccctgcccggtctgatgatctgcatcggccgctgaaccttgccccggatcggctgcgcgacgtcctgtgcaaacgtgagcagcgttatgtcggtgcgcagctgacgttttcgttcgagcgccagcggatcatgctcgaggagaacgaagtgacgcgcggactggtcggtcgctatgtcgagacccatgcctatgccgacggccggctcgatgtgcgctggaaggggcattccctgccctaccgggtgttcgacaaggaccagcgggtgacgcatgcggcgatcatcgagaacaagcggctttccgatgtgctggcctacatcaaggagcgccaggacgagcggccggcgccgaaggtcaggaccaacagcgagaagaacggctacacgccgcgcggtcgcaagccgggcaagcggacggatttcatgaacgatcccgtggtcatcgcccggcggcggcaggcgctctccaatcttgatgccgcggaatgatccattgatctggctgtcaaggctaaagccgataggtgcccctcacccgccccgatctcaccttgcaacccggaccagccggtcagatcggggctggtcgtcgcgccgggccgcagctcaaagtgatatttctactttgcgccacagcggacagttcaacctggccgccacattttttgagtgatttgagtgtagcacagaaggcgaacatcccccactacgcctgagccggagccttttcgtgtgcggctccccccgatccacacccatcattcaccgtttccggtcgcggctctcaagtgccggtcgtaaaggcatccacggccggctttcgtaatcgcccactcgaaatcagtcaggtggaagcgacggcgggtcacgcaaagccggcaagccaaggcctaattgaatcattatccgcccgccgacaaaactcccgtagtctgcgacctaatctgaaatggtcgtctccgagctcgtcggggggttcgcaaagcttcaacgatacaatacaatactaccatcgattgtgaggcggttatcttggcgagagagttgttattcttggcgtgcgcaattgtgattgccgacagctggccggcgaaggcgatcgacatagaaagcctgttcggacacaccatccgcattgagggcgagtaccctgaacgcaccttgaaagtcgatgatcgcgaattgcaccgcaacgcccttctcctcttcgacggcctgttcattgtggacggcgttccagcactgatcggcagcagctcgaatgggggcaacgcctgcgacggcacccctttcgtcgtttcgtttccacctggtgccaggccccgtttcgatggaccgatcgaagcctgtgcttacatcgggcacgaggtctccgacgagagaatcctattctccaccaataacattccgggacagggccgagagcaatgggcttggacgcctgccgacggaatgaaggaattaggcgtcgcagcatttgtccccgacgacaaatcgggttggcaggcgctcagggaacgctcgtttgagcatccttccgacgcccttaagaacgcggatatcgcggcaacaatcaagtcgctgctcggagctgatttcgaagcctttcaggcaatcatcaccggaacgggcagcggcgaatttaagagcgacgactatattggtagaacgtgcacgccccacatgtgcagagaacaggaagcgttgctcttcctgtctgccaaggatcgtcgcgcctatgccgcttggaagccgcaccaaaagaaaatcattgttcacccacctgtgaagcagtggcccgagaaagcaaaacaggaattgagagcatgggcagaaacgtggaagtaacagcgctagcggggctgatctccatacaatagtgccccagaaaccggtgacttacttaaatagtccctaaagcccaccagatgcgccaggttgtttctggggcgaatagtcaataatgcagtagtcatcgccgatttgcaaaaaaatgacgacattctgattggcgctatcccaccacttatcaattgatgtcactggcgttcttgaactctttggcgggccataggtgtttgaaagtttgcccgtcagcgaggggcaatcttgtccggacaacaatttcaatctcacgagcgcaagacccgagtttcggccaaaaacgaatgcggccttgaatttgaattggccggcagagtacttcccgtcaagcaagtgctgcagccgcctgtccccttttaaccgttccggtttttttggcttggtgattgaggcgtcatcaggcgcattttgacgacttcctttggcgtcatgccccatctggtatactgccaatccgcccatgcatgtgtgccagccgtagccatcaacatgagcatacctaaaccgcctgcatggaccaccttcatttcttgccccccagagcgcaaacagacacttttcattggcaaggagtaagcttggccgactccgcattcttcggaccatagcgagcaggaccacgcctactgagcttaagtatgcagggagagtcgttcataggcgattttctcattcgcaggccactccgtcgccatccctgtcgagcttgcgacggtagccgggctcgccagcgtaaataggcgctgcaccagcagcgcgtgccgcggcgcagttttgaaagtagacctcgccaccttcgggcgtggaattaccgtcatcgttcgtctgagccattgccggcagattgccaacaaggatcgcgaagagggcgacggccgtggtaagcaaacactctttcattcggtttctcctggtaccgagcggcgcgcaaaggtcggggtgacaagtctttgcgttgtccggtacaggattatacaaactgcaactgcgcgtatattcggccagatggcttagcccgctagggtaggccttacgggcgtcaaccgaggtgacgagctggggcagttggtcactgagcctcagaccgagcagccctcactgcgaggcgttgatcgcgcgacgggtatatttttcgtcactgcgtgagtccgggccgccggaactccgctcgcgcggtgtgccggccttggccaaagccgagactacacaattggaatcgaaccgcggacgccatgctgcgcgtttctggatttaccccgcactcaatgcttaaagcagttttcccggtgccagcggaggaagtgcggatgtggcctttcgaatagtcgctgcggaacgatcgcgcgtcccgttcggttgatgactggatgctctccgggtcgttcccctgccgcgaaacaaggatgtttagctcgtcggaaaggctggatcaaaccccgatcgaacatccagtgggcggtcccggaaagcgcaatgccattgctcaggatgtcgggaccgttggcttagaccaagcgaatatgcgcagcatcgacttcagcacgaccgccgccgttaatcagctttagtccggtgatcgcgcatcgcttgtcgtatgctttgaggacaaggcgacggaaaagacgattgcgaacgattcgagacgtgagctgagcgacacgatcacgctcctgctcaaaaacgaaggatgactgcagttgctcgcccattccgggtgccaaatcgacgatttctggctcgccgacctgcccgtgcgtttacgatcgaagcgcgaaatggtggagagggggcatgcactatcgctcgcaaaggaggtcggtgctgttcacggcacccggacttatcgtcggtgcgctcgcgataggcgctgcgggcggcatcagcgtaagtccgggcgacattcttgcgctcgtggaaaagcctcacctgctggtcgccgttctgttcgtcggcgccttcactggcatcatggttgagcaggctctgtcaaggatgcgaaggcaggatggcgcgcgaggaaccgctcgcgctgggagaaacagcgctcggcgacgaatgccgtcgtagggccatgggctcccacaagcgttccggaatcaccgaaacgacccgacgctaccgaacagctccggattgttatgaactccaccttcacgagtcagccgctcctcaacaggagcgaaccgcgggtattcaaggaattctatcgcctggtgattggctgcaatccggcttggcaggtgatggcccaagtctcgttaggcgaaatcctccgcagcaaagacgcggacgcgtacagctgcataaacgccaagcgggtcgacctcctgctggtggacggcaactgccgccctcgccatgtcgtcgaatatcagcgcggagcgcaccatcagggtgccgcagccgcgcgcgacgcggttaagaaggcggcgctcaggtgcgcagggatcggctattacgaagtcgttgccggccagaccactccgtctgacctcagacgattggtcgagaagctcgtggagaagccggaacttccaatatgcgctccggactgacggggggctcggccgcggctgttggcgctcagaagcgctctgcccctcgacacaactcagacgccgcagcgggcgaatagtccgcacgcccctgaccacattgcatactggttggatgctctcttcaaggttggggcttttcaatatgttcagactacttgcggcgatactcgttttcacgggactagcttcggcggtgaatgccgatcttctgcagactgggggtagccgatgggttgtgctcgcaagtacgcgagatctcgacaacgccattggcatcgcgaacctttaccagcatcgctttgatgacgttcgcgtggcggaggcctcgaacggttggctcgcagtgatcgcaggaccagtatcaatcgcccgaggagcgaaggcggcacgcgaagaattgtggagtgctggcgggtttccccctgacttgttccttagcaatgggcaaagcttgagacgcaccgtgtgggagccgccgaaaggtcggcccattcccacctggtcgtataaaggtggccagccactagtcttttcagctggagggctcgagattgaagtgtctcatcttgccgagggcaatactcggtatccgtctatcacgcttcgcagggccggacgtctgctcataaaggaagttctgaaggggtccgagtctttcggggacaacatgaatgctgaagtgcggctcgtttggctcgaccgcgcggtcgccgaaccacagatcatcttttcatctcattggaatggagcacattgctgcacagtttctaaaatactaacaaaggtcggcaacggctggacaagtatcgaaggcgctacgctcgatggcggtgggtatcgacttcaggacatcgacggcgatggcagcgtggaattgctcagcgtcgacaattccttcctttacacgtttgctccttacgtcttctcatcagctccgttggtaatatcgaaactcgatggagatcgtttgattgacatgcgctggaattctgccttccgacgctactatcgtcgcgagctctttggatgggagtaccgggcaaaactggaaccagagatctggcgaaagaacggttttctgagcgcttggctggcattgaaatcagtgttgggcgaatcagaccaagcctggaccgtggtcttggaaaattacgatcgttcaagcgaatggcccttgaccgtatgtgatgctcctctgaaggaaggtgtgtgcccagaggaagccactcgcgaggtgagtttcccggaggcgctgcgcgatcaccttgcgcgtaatggatacttgggtccgcaagtggcgaaaatcgaggaaacttcaaagcccactgagcagccgtcacccgccgatagcacatcaacgcctgcggcacctgagaagggcgccgcctccagtgcaggaacaggcttcttcatctcaaaacaaggccaccttgtcaccaatcaccatgtgatcaagggttgcagcgccatcgaagtgcgccgccccggccagttgaggcttccggcaaatattgtggcagtggaccccaccaatgatctagctctactacgtgtggaaagcgatacgggcgcatacgcatctgtccgggtagaaacacggctgggcgagtcagtcgccgtatttggctatccgctttctcatgtcttggccagcggaggcaacttcaccctcggcaatgttacggcgctggctggccttggcaacgatacgcgtttcatccagatatctgctcccgtccaaccgggtaatagtggcggcccgctaattgatagttatggcaatgtcatcggcgttgtgacgtcgaagctcgacgcactggctgcacttgcggtaacaggggacatcccccagaatgtaaatttcgccctacgcggagcaagcctgtatgctttcttgctctcctacgggatctcgcccgtggctgggtcgaatacacaaaaactggacgcgccggaactcgctgaacgtgcttcgtcattcagtgtggcagtcacctgtgaatgacttggcaccggtccgctgcgaacgtgttacgtgcagctctctcgcacatggccactaccactgcaacgtgcaagtcggagcatacctcgagctcgagctcttgatgggagtagaacctgagacttcgtcaattcgacgtctggcgcagttgaatggatccgaaccggcggcaccaagctgtaaaaacttaagtcattccgtgctcgagattttttccaaaaattggcttacgcgagatcttacatcgttacctcccaccacagtgatcgtcgcaacgccctcacgctggcgaagttgacgaacctgacgagatagcccatattttcgttggaggtgccctatggccatgaccgagaaaaaaggtggttcccgcaagcgcaacgagcgccgtaagaaccttatcaccggatatgccggcaaatgggaaccgctctttgagaaaaaagcggcggcccgcgcgaccgcagcgcgcgtgctttctggcgtatccgaaggtgtcaagcgcgccaagaacacgggcggcaccgttcgtgtgacctatgtcattcgatcggcggacgaagagccggaaatcgagatcgaagagatcgcccctcagaaggacgcgctggacaccgccctcgcggccgcaaagcagcgcggcgccgagcgtgtcgccgagatcctcaagggacccgagatgttgtctgcggacgagttcgccgaagagatcggcgccacgcgcgagacggtgaacagaaagcgtaagcgtcacgaaattctcgggctcgaaggagcaaagcgaggcgtgcgctttccgaaatggcaaatcggcgatgatggtcaactgcttggcggtctcgcgcaactgttcgaagctttgaacgggcacccttgggcggtttaccggtttcttcttcaggaaagcgatagcctcggcggtcgcacaggtcttgagatgctgcggaagggcatgatcgagcatgcagttggagcagcgcgctccatcggcagaggtgatttctcctgagcatctcgctgaatttgctgccgccggccgacttcggctcgcgtgagcttgtgacccaaaaattgacttcgaacgccccgtggtaccggctctaccaaagccggtatcccaaccctcttggctacggcttcggatcaagccgcttcagtgatcccgaagtgaccctgtctgcgggtttcggcaaagtccggacaggatttccggtaatctccggacacagttttcagtaattcccggacagcgattccgctaaatcccggacagtttccggcggcggtttgacgggttggttcgcggctgcgccgtcttgttggttaggcctctcacgacaacgttgagaggggccgatgccgagacggaagcaagcaagacgaacgacagtgagggatatccggactattctgcgcctgacccatgaagagggtctttcggtgcgcgagattgccgagcggctgaagatcggcaagagctcggtatcgacctatttgctgcgatctcgggaagccgggctttcgtggccgttgccaatcggcgcggacgaggatgcaaagctggagcggcggctgttcggccgagccggtcgaccgccgcgcgatctcagcgagccggactgggcgctggtggttcgggagctgaagcgcaaaggcgtgacgctgacgcttctatggcaggaataccgcgccagccatcctgatggttacggcttcacctggttctgcgagcaggttgccgcctttcggcagcgcaccagtgtagcgttccgcaatcggcacgcggcgggcgccgtgatgcagaccgactatgccgggccgacggtgccggtgatcgatccggcaaccggtgtcatccatccggcccaaatctttgtcgcggtgctgggcgcctccaacctgaccttcgcccatgccagctttagccagcagttgccggattggatcgacggtcaggtgcgtgctctgaccttctatggtggggtcaccaaggcaatcgtgtgcgacaacctcaaatcgggggtggccaaggccctttggttcgagccgacattgactgcgacgttcgccgccatggcggagcattacgacaccacgatcctgccgacccgcagcaggaaaccgcgcgacaaaggccgggtcgaaggcgcggtattgatcgtggaacgctggattctggcccggctcaggaaccgtaccttcttctcgcttgccgccctcaacacggcgattgccgaattgctcgaggacctgaacaaccggacgatgcgccatgtcggcaaaagccgccgcgagctgttcgaggagatcgagcggccagccttgaagcccttgccggcgataccgttcgaatatgcggaatggaagtcggcgaaggtccatccggactatcatgtcgaggtcgacaagaccttctactcggtgccgcatcggctgatcggatgcaccctccaggtgcggctcacccaccgggtggtcgagatcttccacgaccaccagcgtgtcgccagccatgttcgccgctcccagcgttccggccacgtcaccgtcaacgaccatatgcccaaggcgcatcagcgctatgccaacaccacgccggccaatctgatcggccgtgcgacccagatcggccccaatgccgccatcctggtcgaacgcatgatgcgcgacaggccgcatccggaacagggataccgctcggccatgggcattctgtcgctggcgccgcgctatggatcccagcgcctcgaggcggcctgtgagcgggcgctcaccattaatgccatcacctattcctccgtcgcctccatcctcaaatccggcctcgaccgggaaagaccgcaggctgaacacgcggcccccacgcctgcgcataccaatatccgtggccgatcctactaccagtgaaggaagcaagaatgctgacgaaccccaccctcgaccagatgcaggccctcgggctgacgggcatggccgccgcctggcgcgaattgaccgagcagtccggcaccaatgagctcagccgcgatgagtggctcggactgatgctcgaccgcgaagtcaccctgcgcgccgacaagcgcatccgtaaccggctcgcctccgccaagctacgctttgcccaggcctgtatcgaagatatcgacttcgccgccgcccgcggtctcgaccggcgcaacaccatggcgctcgcccaggggcaatggctcaccgcccacgagggcctgatcatcaccggccacaccggcaccggcaagtcatggctggcctgtgccttcggcaggcaagcggccaggctcggtcactccgtgctctatgtgcgcgtgccccgaatgttcgaggagctcgcgcttgcccgcctcgacggctccttcccccgcctcatcgacaggctcacccgcgtccagctcctcatcctcgatgactttggaacccatacgctctccgatcagcagcgctttcacctcttcgaaatcgtcgaggagcgttatcagcgaaagtccaccctgatcacagctcaggttcccgtggcaagctggcacgaccttattgccgacagcacggtcgccgacgccatactcgaccgtatcgtccacaatgctcaccgcatcaccctccggggcgagagcatgcgaaagcaaaaaagcgcacccctcttgactggggcagaaaacggcgaaatcaatcagccctgatgctaaccaggctgccgaggaccaaccgcatcaaactgtccggactttaatgaaattgctgtccgggatttagcggaatcaatgtccagtttttgcgaagcgcgcaattgccggcagcatcgccgttccccaagatctaggcacggccgatttgtgggggcatggaacacgcgttgccggcattgccgccttcggcgatctgcgggcacaattggcgactggagaactacgtcgaggttccaggatctgtgcggccaaggtcacaaacgatacaggcggctttgacgaccggcgcctcgtgccttcacaaatgcgcgaagcaatcactcggcttaacgaagaattcggttgcaggatttttgtcatctcgctcggcgacaagaagcgcgttttcgacggtggcaaggtcgggacttgggccgcgacgctcgacgaactcgcgcgagagcgcaatgttgtcattatcgtgtccgctggaaaccgcgggccacgcgccggtagccgcgtggagcaaggcgtcaccgagtatccggactacctcctcgaggcaaataatcgcctgcttgagcctgccggcgccatgaatgtaatcacggtcggttcgattgcgcagggagacggtctcgacgccgatatggcgggcgatgtgcgggtccgcccgataacccgcgcgaacgaaccttctccgttttcgcgcgtggggccaggtctcggtggtggcaccaaacccgatcttgtcgacgttggtggcacgttgatcttcgaccctgtcgtcgcccgccttcgaggcggcgaggatcggccgagcgctggggttctcaccctcaaccacaactatctcaaccgtcttttcacggctgggtccggcacatcctactcggcgccacgcgtcgggttcagcgccggtcaaattctcgctcgctttcctggcgcttcagcgaacttggttcgtgcacttttgatcaattctgcagaggtcccgcagcaggcaagcgagcgccttcagatactgggaagcgaggcggtgcgttcggtttgcggccacggtctcatcgaccttgagcgcgccggtttttctgatgatgcccgtgtgacattgtatacggaagacgagcttccgctcgatcatttcgctgtctatcgcatcccaatccctgaggtctttcaggaaggaaacaccgagcgcacaattcgcgtaacgctcgcctatgaccctcccgtccgccatacccggaacgactatgctggcgtcgggatgagctttcggctggtgcgcgggtgcgagcctaatttcatcttcgagcactatcgcaagagagcggaggttgaaggccccttccccgaaatggagaaccgctttaactgcaaactcgagcctggaccgaaggtaagagagaagagctcagtgcaacgcgccagcatcacgttcaagcgcggaatcgagcaatacggcgacagctactacctcgtcgtgcgctgcgagagtggttgggcgacccatgtggatcggcaaccgtttgcggttgtcgtagagctgcttcagaaggctgaagtccggttatacgaacgcctgcgtcagcgcgttcgggcataacagaacatctgaaccagtagactcctatgcggccctctcaccagtcatgcccaacggagtatggaacgtcaaatgtctcaatctatacaaattaaccgctctgccgctgacgcatggtcgcagctggtcaaaggcggagccctcgacattgatggccgcgacaaagagttcgccggggcgatctgcaagatgctggacccgacgggaactgatctcggggacgcgctcgcgaaagcgacgacagatcagctaatccaggtgttctttcgtgccctccagcctttctcagaaatgtaccgtgaaatcctacggtttttcacaacagccggcgcaaaatacgggcgggaccaatggcggattgggattagcgaaaagcacttcgagctgtctgactttgaagatttcgtgcggatgtgggacggcgttcccggtgaaatcgatgttccggcattgggacatgaagactttggcattgtttggcttgcctgggaagcgtatccgcaactaggaaacgtcgccaataaggcggcgcgagaacctgccgagctcggaattgccgacgtcgatcggtggctcgtcgactaccgatcgggccaaatcaaccccctcccactatcggtgctatcagaacaacaggacgcaggtttccgagaattggccgcactggtcgccacagttcatgagggattggtggcgtttagtcagaaccgagctgtgttgcggtcgcaattcgattggcgaacgttgaagggcagtgatgctttttcagtcaaccaacttgccttcctcgatacggacaactggctggggacagctgtcgcaggcctggcgctggcaaaggggatcgcccctgaaagcagaagcagaatcgcccgcgttctccaaaatgcgttcgagggtctgccaactcgcaagctgaaagcgagagtctccttgaacgatctcgaccggtttttgtcattgccggtttggcagaagcgccacgagatctatgcggtctgggtattcacagaattagctgcggccgcgaatgagcacgacctggagatatatcacgaccaaggtaggatcgccttcgagttccgggagtctcgacttgccactgtcacgtcggcacggccaccaatcgatatgataacggagcgtcgctctccaattgcaaatccagtcggcgctggtcgaaccgccaatgtccagccagatttcggactttgggcacgcgatccgggggccgagcgctgcgctctggtggtcgaggtgaagcactataaacgcaccgcgaagaagtcgttttcggaagtcatgaccgactatgcggctgctcatccgaatgcgccgatcgttctggtcaactacggtccgatcggcgacattctggactgcatcccgctcagcgcgaaggctcgttgcgccaccgtcgagcacctgactgccctcaaccggacagccagggaggaatttcgagacttggttcgaaaggtgattggatggccagtgcgggcggcgcccgagatcggagggacaacccgggcgaaaagtgctgtcgcggtcgatgtctcgcgttccatggctccagtcctgagcgatcctcgattcagctccgcgctggccgcgattgcggtggcgccgcacgcctctgaaatctttcccatcgatcgacgtgtccacaccgcaatttcggtcgagcaggcgatcgagcggctgcgtagcatccaaggcgacataaacgcgttggaagctccggttactgagctgcttgggacttatgacgaagtgatcgttttgacggatcgggatgggcttaacgatttgagcgcattaagatcggcaagtgaggaatttgccgcaggtagctttttccgggtgactgtcagcaggcctgagtcgacgtgatcggccgaggctcgccgccaaccgattagactacccatcacagcattgcccccggcagaaatgccgggggcaatgtttgaattcttcccgtcgggagccgaaagatggctcaatgactgactgctaaaagccgcagcttatgcatcctgcgatcaacggccagagccgggttagccgcagcgacagcatccaaaatggcggcgatatccgatgtgcggcccttgcacggcggcccgcatgcggcccacaccagcctgagggcggcgaccgggaagcgcgtggcgagctcggcattgttacgttcgagatcgtgaaggctgagccagtcatcctcgaatgtcgagacatatggtagaagggcttcgaccgcagcttcaaacgcagtgccggccgccgttgctaacgaaaatacttccttgctcacgtcatttgaaagatagctgcggtcgcgcggccagatcgcctggaatgttgggccatataggtcagtccaggcggccgctcgctcgtcgtccggattttcctcaagccagtttgtcataattttcaaggcaccgacgcgtatgtccgcggcagcctcccgaagcgtctgccgcgcctgctgcggcgagatacccctgaccacattcggttcgtcaaaagacgcaaccaccgctcggacgagatgcgaggctgcattggcggccgagacatctttttgccggctctcccgaactccctgtagaatgagatcggcaaagctgatttcagtatccgcaacgaagctgttgtattcgaccaagaccccgcgtagtcgcctcccctcatcattgtccgcagcgatgaagggtctcaagtggtcgagagcaatttcgttcgaaacgctgaaaacgaatgacaggtaccggacgcacgctgcacgtgccatttcgccggaataggtcatggacacgatcatccgctgcaatcgttgaaagtccgcggcgttcacgtcgtctccattttccctttgagagctgatagcttgaagcagtgcttccgcaagtgatccaccagtcgagttgatgacccggtcataggtctcgacatcatccccccaatcaacgtcgggctcgccctcagcagcttgccacagccgatcccaccagttcgcgggaagagcgagttgaagctgccgtgagtgttctgctatgcgagccaggggaccgacaagagcgatgacgatctcgtcatctgcctctccgagaagctcgaccgcttcttgaatgacacgcagccactctgggcttgtcatattcgcacgactgggaatgatctctagccacgtcgcccaacgtgcaactacgccgatttcaaggggatgagaacgcagcgcagcataggctccgaccggatcctctcgacaatattccacccagccctctcgatcttcgatgtcgctgctttcctcgagccgatcggcgatcgtgaggcgttcgcttggttgagccgacacaatttgcgcggtgcgcccgcggacggccctgactccggagctccaagtgcggaaaagatcccgctcatcgatttcacgcgacaggtatgtgcgccgctcacgaatttcgtgtagcagggtttcggcctcctgcgggagaactacgtgctcactgatcgcggtcaatcgaacccaaatatcgcggtcacgtgcacggtcctgccagtcgataccgtcagcgttctgttcccggtcggcatatctttgtggaccctcgacaaggaggcgccgaactagacgttcgaccgcctctccgcttgcctgagcaatgcgagcgcgaacaatggcgacgaactccagcgcgaaggaccagaaggccgcctcgttgctggttgccagcgcctcaatagcctcgtcggcggtgaaaagagcttgatgtgtaagtgcgtgcatccaaagccgggtggtcaggttgaacggctccgcccgccatccgccgaccacccttttcgtcccctccaaattggcttgagcggccatgggcaacgcggatgtgataaatacggtgagcggaacaaacccgcggcgatgctgattttgctgatgattaacaacggacggtacaccgaaatctgtaacatcgcgtacctgcccgatcagttcagcatcgcgcgcagtccggagctggcaagaaagtcgctgcgaaccccgctcgagcagccgcaggatgttttccgcgttgccggcgggggacgccaaaacatcccgcaagaactcctgatgctcgctctccatcgaaaaacgagcaatatccgagagctggtttgggtgctcagaaggatcctcatcgcgaaacggcgcctcgattgtcaggcgcggtccgatggcattgaccaagtgtccgaggtcggactccacgaccggccctcggttcagccggtgacgcagctgatagtctcgcaaactgtcgtgtgatgccgccgcggccgcttcggcgagcaagcgccaggctttctcccatatcgcatcctgcggacggttctgatcgagttcgcgaaacacggcatcggagaactcctgtgatcccctccccagatgtttaatggcggttaggtatctgaccttgtcatcccatcctcttgcgaaccatcgggcaagcatccaggctcgcgcgcgttcgccgaaagctcggatcaccacggcaagtgtgtcgaaccatgcagcatcttcgcatcgcgtaatgaagtgctcgaaaaggtcggccctcgcgcccagcgcccatttgagggtgcgaatatcgtggtctgtagtttcggataccgggcccgagacgatggcggcgatcatctcgcgacgacgaacatctggattctccacgaggttggccaggccttcaagacttgaccatagtggcccgtatggattgccgccttctggatcgaataggagcggctccaccgccagagcctgccacggggcggccgcggcttgggggtcgccatttgatgagctgagcgcatatacgcgcctgagatcggtaaaacgctccctgtcaccttccagaacgttcaggatgtagcgcaccggagcatcgttcgcagtatagcccaccaaaaccaaggtgcgacaacgcatgaggtcgaaaaggaagcgagcggcccagccggctcgcagatatgcctccccatactgagcgctggtcagtaccagttctgtttgggaaagattgagctcatcgtcggtcagccggccgtgggtgtggacaactcccgtgaacctcgcgctccctggagcgggtatatcctgtcctgccgcgctctcctgcgtcgcgaaagctgccgaatgcgaaaccatgagtgagcgctcgaacagcgtgtcaaagttcgtggtgacgataatcggccttccaacctgatcacgtgatagccgcaggatgacgtcgtgatgcgcggtatcaggatttgcgggaacctgcagttctgcggccgcagcgtctataacatcctctgatcgtacaaggcgccgtgacagggcacccaaaacttcttcatagcgagacgcctggaaagcatggtcttcggcaggcgtgcgctcttcccccaatcgattatagacgttgagcacgaggtcgcgaaaatttggcagttgcggcgcgctgacccctgcaccgcagagaaatacgacattcccttcgagcagttcgtcgacgagcgcttccgggaaatcaggaccgaggtgatgaagtctcatggcactctgacaagctcttccaagttgaatactgcgctgcgtcgcatgcgccgacgctaaaccaatgcatgaaacatgtcttggagaattggaagcgcgattgcggttccctgacaagcggccgcgagagcggcggcttttgcggctcgattgttcagcgcattggcggcgttctgcgtcttgaagacatcaatatcgccctttgggccggaggctaggatagccgcgggtctccatccgtcttccgggatctcgtgatcgaatggtacggcaattaccgttgaccgccaccataatccagcagcggtgaacgctgccattgctgagagcgcgtttaataaggtgactatcattttgcagtctcgcagcttcgggatccactgggcctatatgtagaacttaaacggctgtttcttctcgcctttgatcgccgatcccatcgtcaggacatcgccgaccattcgagcgaaccgcacggtgaccggaaggccatcgttgaagttgcaagaattgtagttgatcttggtcaggcccatgatgtcggacagcacgtcacgaatctcgggcttggcatccttgctccgcgtcacggtgacatgtagcggatttggggtttccgggccgatataggtatcaagctgcggaacgtatccggtcgtccaaatgtaggctgtctgcgcatcgaggatcaaggctgtgccgcgcaacacaggatagtctccatcgcggaagagcttcatttcgccaccggttgggcgaatccgcacgccaacgacatttgtccccttcggcgccgcatcggcaaacgcggcccattcctcatcgttgaagtaggtctgaccatggatgaagagctccttaggcgcctcgccgtgggtatcgacatagctatcaagaacgagcttcaggaggtctttggctgcgggagccttcaaatgatagtcgtagtccccggtcttccaggggccgtttgcaccacggaaaacgacaccgtcgccctcgttcagaaacatttgcgccgcgcagcacgcgtggccatcgggatcattgggcaggctcttgtagaccatgccgaggtagcaaacgccaggccggatcgtcgataaccgccacggtgggcgcggctgtgtcttatagtacagaccagtgccgagattccaggcaaccgtggcacgatcctgcgtcttgcgggtcgggtaacctgccgtattgagaaacgcgcctggcgcaagcgtggtttctcgaatgagctgcgtcggcgcgatgttcaagaaatcggctttgatgcgccgatgaaaatccggaacgtcgtcaaaaatggtctcaccactttgatcgataatacctgccaagagcggcaggctttcgcgcttcttctgcttcttggcgaaatcccctttctccgttggcagaccagtgcgcttagaatttggtcggcacctttcatagacgatctcaggaagcaccagcacccagatgtctaccgcgcgctcctcgttgtggagatgtttgtttacacgctcgatatagagcttcgcgaccttgtccactgcttcgtgctggtttgtcacccgcgtcgcgcgatcgatatccgcgagcgggatcgataatgcgctgagctcgtctgggtcgtaggaaattccaaaggtctcttccaatcccgggaagttcgcgaggtgcagccggttcgccttttctcccttcccgggcgggggcaccttgacaatggattgtagctcgcggctccacgtccggaagtgaccgatgccttcacttgtgccgatgacaccgacgcggatttctttcgcctttttccccttgagatggggtccgtaaaggtggaggccgtcctttgggtgcgcgctcttctgaccgaaggcaaactcaagttccggctcatggatatgatcgacctcaagcgatcgttccagaaatttcattcgccgccctcctcatcactgtcaggccgcccgagagtgctgtcatccagctcctcgtcctcgtcatctaggtcgtttggaagaacggtactgaccggcgatgaaaacagcatcggcgatgcctcgataacgaaggtttccgtctcggaaagagggaggcgaacaaaagccgattctccggaaagcaattctagaaacgccagaagccgcccgtaccactgcttgttgcgccagcccttacagaccgatcgcctcaagcggtgtagcttcttgggatcgtcgacaacaaggccggctggggtgtcgttatcttgcgcaaacaggaccctcgacttcagcttgaagtgccagaacggccagaaagctggcatggcagtcacaccgaattgccagatatggcccttagcggaattgcgcagcatcgatgaccgcttcttctcggcctggttcccccacggaattcgcttgcccgtcggcgcctgttctggtgacgcgtggaagccgatgccattcgaatatccgtgttcgatgaacccgttgcgtttgcagtagttgaaccaggccttcttgagcatcgctacaacgaggttggaggcaatctggcggtcaattcgcagtcgctgaaagccgccctccgtgaattccacgagcggaatttcatgtttcagcttgaagcggccgacggcttcgaatgccatttcgatttccggcacaccaccgaatgccagaaaacctgatcccccgaccaatgcgcaaggatgtccatagctgtcgatcgctccctggaggcgccctttgttgatcgatccagagcattcgaagtatcggatgaaatctggcgcctcggcgacccgaagccagtttgaggtcagtcgctcaggaacttcgatgatcggcacggcgccgcgccggcgatagatctcccagttggggtttatcatcgtgtcgatgctgcgctggactttttgccgttgcagggtatcgatgagcttgagcaggccttctccccaatttcgaacgaaatcgaccgcgacagtgtcaccgagacctttgatcttccgaaacgtctccatgcgcagcggaatgacaaaccgctgatcaccgagttcctttcccgtttctagagcaatgtcgaggtcgtcctggatgctgctatcctcaagactggaatcacggcagagaagcaggaccttgaccgcgcgatggcgcagcgcactggttatctcccttcgccaacgttcgccaggcatgagggtgagcacgtcggcaaagacctggtagccctcggcctcaagctttggagcaagccatagcgtgaactcgtcgtcgatgggtgaagccttgattatgaagatcgtatcgcgctttacgggctcgatcggagcatcggctgccccgggtggcggcatcaggcgagcgagcgttttgggaacctccgccggcgccattgccttgcgcaccgcgttggtgacgacctcttcgagcactggggtgctgtgtgcccagagcccttcatgagccttcacaatctcaggataggatctgagcaagccgttgaggtcgtccgcgccaaatatgtcgccgggtccgactaggcttggtccaatgatttccgtcagcgttgccttgtttgccggggtaagcggtacggacgtcgtcagaatgtatcgttgcggggccagttcgtcgattgaaacacgttcttctcgcatcttcgacttgagtttcgagaagccagatcggagatagtgcttggcctggaggatgatcgaaccatcggctttggcgtggcgtccatccataccgtcatctgcgccaacggtgaacgcttcgaatcgaactccggtttcggcgcccacaagatcgcgactcaggttctcgaagtcatccggagaaagtgttgagaaatcatacttcatttgtcggatgatgggtcgcgacaatactaggcgtcaaggcatcaatagatgtcttctcagttgtagtgcggttaccaacaactctgatcgcgtgaaagcgctgactgcagtcccgtttcgccagagtcgccctccgctgagcccctcgtgaaaccgaataccccagcactcgagaaatccggaagcccgctcggttctcaactacgaggacggatcggtaggtaagggccccacctgttccaaggtagcagagactgccgcgctgtagctgggtttggcggtgacaaaatctcgaagcgaataccgctccgtagaacggctactgcgcaccaagccatcctcttcgacccaatcaaaggccgagataaacgcatgcaggccgttcgcccgctcgtaccgagcatcatctcctcgcctctatccgcacgctaccccgtcccgcgtgccgccaaccctatcacgcgaaaagcacctcggtgaggttctccggcggcgaccagaggccagccttggccttaacgtaggtttggcaaaacgtgacgatcttctcctgatcgccaaatttcagcttatgcttggcaatagtcgtgagctgttcgaacgcattcgacgtgaaaccgtatgtcgacaggaagaggccaccatctttcttttcttcgacgatgatcttcaagagcttttccacggccgccgatcccaccttcgtggatgaacgccaatgtttgatctctacgtaatactcagcgagcttacccctcaccgtgcacgtcagaatgacatcctttccaccatccttcgaccccggcgtaagcgtcacggcaaaacccaacccttcgaacacctctgcgacgacctgctcgaccatgcgccattcgagatgatccagggcatccggacttttcgcgatcaatcgcgctagcccgctgcttagatcccgcagcatgatccgaacctcagcctccacatcgaccttctcttcgcgcaggcgactgatccaggcacgcattccgccaatgtcgagcaattcgatcctaagcggcaagcttttctccactgcggcatgcgcctcccgcggaaattcgccgttgctcaccagcacgacgcgagtgagatcctgcaacaatgcagcgccgatcaacttctgcagatctgccatccccacgcggctaacagtcttcctgtaaaacttggcctgaactccgatggtctcggcgggtgcagaactggtctcatccgccgtacgcgaggcgcggaaatcgattccctgatcgttcaatccgccagtatgctcaacctcgtagccttcgatcccgaaaagcggctccaacacgcggcccaggaccaattccgactcttggggatcgaggctctcgttcgcccgcaatttattgagctcgagatcgagtgcatcgcactccgctgcacttagttttcccaacaaccgccccaaccgcgtgctccttccaatattcccatacctaattaccaaacggatttggtgatacccgtagagcctgacttgagggttgagaaagccgaatttgaaagtgttggtgtcaattttaacaacatgtcgcttccgcccagcaaaggtgggacatgcacgcttggcaccaggatctcgtagacccactaccgccgaaaaaaggggcgtgggcttatatcaccccccacgcccgaaacctccccctccccgtcatctctctcaaccccagctccgtcacgatccgccgcgccgcctgtggggtgacctcgagcgtcttggacaccatcccggccgaaacgagcggttttgccatcacaagttcgaccagctctggcagttttgacgaggtccgccgtccgtccagctttcggtccatcatcgttttcgccagcgtcagccgatcatgttctttcatgccgatctcagcagccgccagcaaaccgtgggcgatggcaagcagccgggtctcccggccgcgatggcggcgccgatcgacgggtatggttttcagaccgagattgatggcggcaagatgggcgccggtggtgatgccggcttcccgcaggattgaggcgcaaagcagccggccgagccagggcgcgtgctgcaggacagacagttcgttccaggcatcaagggcgacgatcgcctgcagcaccgccggcaagtcttgagcctggcgcagcacgctgcgccattccaccagccgggcgtcctcatcccaatcgaggtcgtagaccagtggatccttctcggcagcccagctgttcgcgccggcacggccgggtcgccttgcgtcttcgatcgcggcctccgaacgtgccagcaccgcatcgatggcggcataatcgacgccgggcagatctttggcgtcgttaccatcgtccccctccccttccggatcgatagcgaccgcgggccgaatgacgtcggccggctccaccgcctcgacgccgaccgggttgatgtccgacgtctgtcgcaaagttcggataccctctgtcgataacggccaatctggcgactgcgcagcgatgcgccggcgggtccgcaagacgtcgcgggcgattgtcagttcgtgggttggggtgcggatgtcgcgggtagcgtcgtggaggacgaggtcttcgagatggacgagttcgccgtcgatccagagggaggcgcaggcgtcgaggaaatgcatgcgctcaatccacccgcttccgaccggtgagcgggcgatgcgctcgtcgagacgcgtgaaaccgatgccggcctcgaaagccggccgcatcagggctgtcgtgctgattttcgccagatcataagccattgaaattatggtaaacaattttctaaaggaactctagtgcaatattactgttcctcacatcgtacgctttcgggttgcttctaaccatcgataggtttccagtatcgatagttatggatttggcgttgcaaatcacctacgtcggtcgtaccagatcggggattcgcctggaaacccgggcttttcagccccttcctcaccctctttcagcgaactcattcccctgatcgagtgaactggacctctgccgagcggccgaccgcggagccgtcctccggctatttcatcatcccggcctgtcagaaatgcaacggtggtacccgatcccatgcgtaacaggggatttcatcgcatttcggccacagaaggccgctggcgcgatttcccgaacttcgacggtccgagacctgttgcagaccagattccgcgctgtacggccttccattttgaacataaaacacgcttgcaaaggagccttttctcacacatgtttcatttgtacaaaccgccccgaaacgaccgaaaaattcgatggcaacggctgcatacctcaattctccttccctgcagcaaaggctgatcggatacgcccgtgtttcgaccgaggatcagctcaacgacgctcaggtcgacgaattgcgggcggctggttgccaccgcatccaccaggagcacggatccggcgcatcacgcgcgcggccggtgcttgcgaagcttcttaaagaccttgccatgggcgatgtcctcgtcgtcgttcgcctcgaccgtctggcccgatcggtcagccacctgctcgacgtcatcgaagacctcgagaagcgcggcgtccatttccgctcgctgcgtgatccgatcgatacctcgacgccgcacggaatgttttccctgcaggtgctcggcgccgtcgcccagctcgagcgcgcgctgatcgcggagcggaccaagtccggtatgcaggccgccaaggcgcgcggccggcttgccggcaatcccgggcttcgagaacgccggccagaagccatccgtgcggtctcagcggcgcgcgagcgggcctacctcgatgaactgattgtgtcagcgcagacctggctgccgacagtccggcgactgcgcccgcgacacagttgggacaatgtcgtgcggatcctcaatcgcagggggcacgactggaccgtcgaacggttgcggcgggcggtccaccggctagtgcgcgaaaagctcgcggaaccggaactgcttgcccgatcgctgcgccggccgcccgaggatcatctgatgcggctggttgccgggatcgccatcgccgatcccaatctgtcgctgcgcgacattgccgcccagttggaccagatgcaggagcgaccgccacgtggcggccgcaaatggcaaccgtcttccgtccgagcactactggacgaggcgagtcgcatcgggctggttcgcgcttgagaggcttggttcatgaattcaagagtgttcacgcggcgtcgaaagacgggtgcggcactgtttccggtcgccgcatgcttccaaatggaaaaagaccgagcaacccccgggctattccagaaagctcgcgttgtgaggaaggggccgcctaggcctgcaaattgtcagccgacatcttgccggacttacgatcctttaccagctcgtaactgatcttctgcccatccttcagctcccgcaggccagcccgctccaccgctgaaatgtggacgaagacatcggcgctcccgtcgtccggctgaataaaaccaaagcccttcgtcgcgttgaaccattttaccgttccggtcgccatcatgccttccttcgatcatttgccgtacccgccacagggcgggcgaggctcgcttcgtatacgcgcgcacagatagacgcttctccgctccgggtaaagcagcccgaacgttgacgcaactgcccagcccaagcaagcgatcttcgtcgccatagacgctactttttgcctctttgtttcagccgcgatgctgacgggagcatcctctgcttgccacacgtcgaactgatttgtcgtacagataagatcactgagttttcggaacccaagcgtgcacgggtcgaagtccggcgccaggtgagacctccatttgccgcagagcctcatccgaggcgcgctttccgcagagccccgcaaggttggctctggcggctgaactcgtcgtcgcgagtcgtgggctaggtgcctgagtcgccctcgatgccgacgcgcgacacggcgatgctcgcgctgactgcctttctctaggcaacggtgatccccgcgctcaccggcgcggttacgccgggcccggccgacctcgatgcgctcgccctgaacgtgttcgattgaatgaggaacccgttcgaggatcatgctcccgcgccacctgatctgccccacgtacagatcagtctgcccgttcgagtaccgctagacgctcgcggtaagatggtttctactgccgaagcaggaagttggcgcgctccatcagccagtacagcgcttcctccgagacttcaaaatggcaagggaacatttcgacaggcaacacagcagagcccaacggttgcttgagcttagccgtgtggcaatctcccgcgactgggacaaacacgcggcgttcctgcccccgtgccgttgagggcgcttatcccactctgctactaaccctgacgaaccacggccctcccctcgcatagcctgacgttcctgcgcgacttggccgaacaccgggacagcggctcgtcgaagcttggccgcgcgaactttctcgcaccgcgcgcgatcagctgcgaccggcgtcgatatgaccgtgtcccacttcaaccggtcggaggccttgttcgagtattgcggctcagcgagcttgccgtcgctgacgaggacgagaattccgaagtccgaggaccgcccaacgttgtgtggggatcgactacagcgtcgcaggcatagaagccgaacataatggtcttcagggtccgccgcgcttcttgaaagcagtggagctgccttcgagcgcatctaatcgtgtgagcgcgggaacgtacgggaaagcccgtcgccgaggctgctcggggcacgctggcaaggggcacgaccctgttcgtcgtcgagtttcgttgcttcgcctgccttcgtggcagcgtcttagcctgcgttccagtcgctgttgtgggtagggattttcctccttgcacatcccgatctccgccgtggtgaggccttcatggaaggccgacagtaccgttgccatcgctgcccccgaacttcgttacggccctcgtcaacccgccggactgtaccaaattggcgaagcgtaagcgcgctgcgtcaatcgaactcaggaccccttcccgcctctgattttaattgagcaggaacatacggtagaacatcgaatagcgaacgaaggtcccaggaccaccgcggccggtcaatcagagcgccacacgttgatgtctcaccgaccaggaacaggtccgtgccaaccgacgaagcctcccctgccccaccctgcgtttcaatccgcctcgaccgcaccaaaacgacgacgagcgatgatgacgaacatgtgctcttgatctgccggccggcgatcgccttgaaacgctggctcatggaaggccggaaccaacagcgcggtggtgttccgcatctaccacatgaagcaaatatcgaccggcgagcgctaccagccgcatgaaatacgcttagccaagcgataactaatgctctgttggaagtgtgacagtcattctggcagaatgacgaaacgcggtcacctacggactggctaaactttacgactcgcgtcctacaaacaggcgatcaacgcctcgaaagttcgaccgaacccctcccttcaacagcaaacgaagacagtttagaactaacgctctgattaatttgcgcaaatttccgtttttgtcagctgacaactttttacagtctgttttaaggaagcaatagtctcccctgcctttgcaaccaactaaaaatcaagatctggtgtagcatttggcctttcacagcatcgtcctggcgctcaagaaacatctctggtctgatgctcgaatgcctccgccaacttctcggacaccatgctgagggagctgcggactggtcgggcttgtccctgcctttggtgtcgtccatattgccatcgaatgtccctgcctgcactgtcctcgtaccgacgtggacgattggagttgctccccctactgagacaccataaacgaaagcgtcataacttctcctaatcggttgactcaacgtcccaatctgccgattttgtcagccgacaacaagcggtcgcccaagagctgaggggattggttcccgccgattaagcgggttcttcggtcaggaggccaatcgatcacttccgccgcgcgccctcagcagtgccatcaacactggccccggcgaaaactcgccccgctttgcccgagacgttaggtcgcggagatatccgccgggcgatttgatgtgccctgaccgctccagaatgcaggccatgacagcggatgcgttctcgggccccataacctcacaggcatcctggtaggccgacggactgacgcagagcatcgagcggacgaccactgcggcctgcatcaggtcacgcgggctcgcaactacgcctccggggccataatctgagatgcttgggcaagcccgcaacaccatccccaacggaaacaccttcatcggctcgcgttgcggttcgatggctgggctcggcctttcgccctgctcttctcgagagctaggttcaaattcattagtggattcgggatgtgaattctgtttgtgccgctcaatttgatcaggattgccgctcaaattttcgatttttaacctgatttccagaaggttggagatttcctcgcgcaacatctccatctcttcgaggatgggggcgacggtcgcggccgttgccactcgaggaatggtcgctactaggctgcggtagtgctggtgaattccgtcccaattaccgtccactccctcctcaatggcgacttcaatcagcttaccgatatcgcgccggcagatcgtcaggcgctcgcgaagtctacgcaattgcagtcgctcaattttgacataggcagctatttgctcgatctcgcgtgcgcgtgacagcaacggagccaacgaaaacccataggcctcatcgatcgaaccgtctccgtccttgcgggcgtagcgtttgccatttgggctatcccggcgtgccagaaggccagcgtcgacgagcgctgcgatgtggcgacgcaacgtcgcttcagccatgccatgcgcacgaagcgacaactgcatgttagaggggaacacgatgaggccgttttcctcagacaaggtcgtctcgggataaaagctcaaaagtgcgttcataacagagagcgcacgttcgctgatgccgagcttcggcttagcttcgcagagcgctcgaaacagcttccacttgtcagccgatgtttcaggttcgagttcacgcgacatatattggcttgccaacatgccaagcgtcatcgaccgccgcccgaagggcgtcgtcacacttccatcttgcatcttctttcacctatcctcaggcaaaagacgtccgctcacccgttccggtgccaaagactcttgactgcgattcgtggaaatgcgattctcaggctgctaaacgatgagagaggcttccacgatggttaccgtctgggggcctttttcttttgcgtcagtcttccttccgattaccctgctccaggaactcggcatagagccggtccaggttgtctgcaatataccgcccaaaggggccggcattccttgatttcatagacaaggcaaacgccttggcggagttcgaatacttagcggagacggtcttgtccgccggttgccagttctccaggatctttggagtcgtcttccggacaggcttcgccgcgctgttcagaccagaaaacagggaattgaagcgatcgtcagtgctcagttcattgaaggaaggatcagagacgattgccttcaccttcgcttcgttggcggttttacccacaagcaatgacaactcgacccagcgttctcggccgaccgccgggcagggcccgattcttgcgattgtctcttcaggaatacgatctattacggcgatcattttcgagatagcggccgcattggcagcaagcgccgatcctatgattgtccggtcatagccaagcttctcgaggtgcgaggcgaagttcgcccgttcaatgaaggagaggttggcgcgcgccgagttttcctgtccctgggcgataacgtgcgtgcggtcatccagcgccttgacgaccgccttaaccttgcggccgagctcgcgggcaacgcgggctcggcggtgtccaaagacgatctggtaacgatcggctgccgacgggtgggggcgcacaaggatgggcgtatcctgcccgcgctcggcaatcgcctgcttcaattcctcgaactgctcggaactatcgcccatgcgatcagagacgaacgaaccatcgagtgtctcagggtcgagttcgacgaccgtttctccttcgagaaatttctcggcctggcgcgacaactcgtcgagcgagcgcaccatgctcttcgaagccccgcgcatcgggtaggcgggcgcaacgtctgcgtgcgggatttccgctgtgtctaccagtcccgccagtaggttctttctcgccatgtgcctgctccgtttgcctgagatctaccgggccgtcccggggaagtttacacttctcaactgacaaccttcctcccccaagaggcatggacgagttcgacgatctcggcgttgactgcgttcaaggagtccatcgcgcgctcataggtggaccgcgtcatctgactcttgtcgacttcgtaaagggtctgcttggtgattccggcgtctgaaaccgctgtcgatttcagcatctggttcttcagcacaaactggtggaacaaggtctgcatgaagcccaccatctgcgcctgcggcccatccgttggctcgtaccgggtgatcagatagcgataccattcgagattgaccgcagcacccacatcccggatcggcttcaggatcccgcccagcatcaaaaggaactggcccatcgacatgacgtcgagcatctgtggatggatcgtgatcaggacgctcgtagccgcagtcagcgcggtgatcgtgagatagccgagctggggagggcagtcgatgacgacaacgtcatagcggtcgttgacttccgacagcgcgcgcgaaatccgcgtgaagaaggtcttgccatcgttcgagctcttgttcgacatcgcaagcggggtgtcgtactcgtactcctgaagttcgaggttcgcaggcacgatatcgaggcccgggaaattggtaggctggatgatctcactgatcgatcggcgttgatcgtcatatctgagcgcctcatagagcgacggcgacatgtcgagttcgggctgaaaaccgtgaagcgacgaaagtgacgcctgcgggtcgaggtccaccgccaagacacggtgcccggtcaacgccatgtactgcgcgagatgggcggccgtcgtcgtctttcccgaaccgcctttgaaattgacaacggcaatgacctggagcttttcgcccgaccgacggtgcggcacgtagttcctggcttccgatcgtccatgctgatcgagatactgacgcagttccgccatctgctcagcactataagaacggcgacccgacgacgatgtctgggggagggggccttttccctcaagatgaagtttcttcagcgtactttgagagacgccgaggaactgcgccacttcagagagcgagaactggcgaagcagtttcttggcattcggtgggaactgctgcatgcttaaaagatgcaatttctttgaaatcagatcgccctgttcgaggatgagatcctcgaaatgcatcggctgtgcgggagcgatgggcggcgaattagcgttcattgcaggggaactctcgaataacggtttttcggcccgagaaccgacataatcgttattatgtgcgattctcgccgactgacaaggaatatagagttaacaaagggtttataccgcgtcccgagcagcccctgctcgccggcaaaacatgcgtgtttctccttcattcctaggcacttagatggacgcttgcgctccgccaggcgccagcacttttccaggggagaaatacggccgttcgcctgactaccaaacgtcaccgcgaaatagcggtcgtattgctccccgcgactcacccgactcagccttggtgaatatattcgagttctgagttgctgcggttgcccggaaagagagccggggcacataactttgctgccaacttcttcattgggcccagcaattggttctgctcgacttgctttcaccatctgtccctctctgcggcgtactgtccgttacaggccatgccccgcaaaaatagaaggtgattcttcctgaccgtccagaagattgggattgacaatgggttgaaaagaccctgcttggctcaagtgagccgaaggattactttcgcaaatttgtatttgtccgctgagggttagacgcggatcacggccgtctatggacacgaattgttctcctgtgaatcctacaagacgcaagggggccttcgggtctgcaaaggcagacgtgacgcgacgcaacgcccaacgcgttccagggaaccttgtaggatcctacaactgccacccgattccgatttgtgctgatttccccgcggtccaacaacgacggagaaattcatgcagattctcgcgatctcaaagccgcgaaatatcgaagaagcccaacttctccgcagccatcacgaactgcgcgcccgcgtcttttccgatcgtttgggctgggaagtcaatgtcgtcggaggctgtgagtcagatactttcgacgatcttcaaccgacctacatcctagccgtatcgagcaacgatcgagtggttggatgtgctcgcctactgcctgcgctcggccccacgatggtggccaacgttttcccctcgctcctttctgccggtcacctcaacgctcattcctctatggtcgagagctcgcgcttttgcgtggacaccttccttgctgagagcaggggagacggctccattcatgaggcgacgctcacaatgttcgcggggatcatcgaatggtcggtggctaaccgctacaccgaaatcgtcacggtgacggatcttcggttcgaacggatcctcgcccgcgtcggttggccgcttcagcgcattggcgagccaaggccgatcggagcgaccgtggccgtggcgggcactctgccggcaaaggcagacacattcatgaggctccgccccgccaactaccgctctcaaatcatcagcacttttggccaatcagcgtaaggagaaatcagtggaacagcttcgctctcatcctcgcctcgtccgcaagcttcaggaggcgcttggcgaccagctctgcgttgctttggacgatagcaacgtagtagagataatgctgaatcccgatggtaagctgttcatagaacggctcgggcacggcgtcgcgcccgctggcgagatgtcgtcggctgcggcggaaatggtgattgggacggttgctcatgccctccaatccgaagtggacaccgaacaacccatcatttccggtgagcttccgataggcggacatcgtttcgagggtctattgccgccagtggtcgcgaagccctccttcacaatccgtcgtcgggcatctcgcctgatcccactcgacgactatgtccgctccggtgtgatgaccgaggcccaggctgcgacgatccgcagcgccattgactcacgcctcaacatcatcatttccggtggaactgcctccggcaaaacgacgctcgcaaatgcagtaatccatgagatcgtgaggagcgcgccggaagaccggctcgtcatcctcgaagacaccgccgaaatccagtgtgcggccgacaacgccgttcttcttcgtaccagcgatacggttgacatggcgcggctgctcaagagcacgatgcgcctgcgtcccgaccgaatagtcgtcggcgaggtgcgcgatggtgctgccctcaccttgctcaaggcatggaacaccggacatccaggcggcgtggcaacaatccactcgaacacggcgacttccgcgctccggcgcctggagcagctgacggccgaagcaagccaacagccgatgcacgaggtgatcggggaggttgtcgacctcatcgtttccatcgagcgtacgccgcgaggccggcgtgtgcgcgacatcatccaggtcgagcgcttcgccaacggccgatacgagatcgaatctgaccaactcaccgaagaacgggaggagcggcatgtcgcgtaagaatgaatttatctccatcgcgcttcttgcttcgccactcattttggcgtcggtagcaccggcactggccagttcaggcggcagtctgccctgggaaggaccgctcgagcagatccaggagtccatcacggggccagtcgcgggctacatagcacttgcggcagtcgcgatcgccggcggcatgctgattttcggcggtgagctgaacgatttcgcgcggcggctgatgtatgtcgtgcttgttgccggcatcctcctcggcgccacgaccattgtcggcctgttcggcgcgaccggcgcttcgatcggcctgaccaatgatcgcgccacttcgacgcgcccgagtgcagaaggggagggggcacatggctgaggcgctatccgaacgttaccgcaatcgcattcaccgtgcgctctcccggccgaacctcctgatgggcgcggaccgggaactggttttgatcaccgggcttgccgcggtcatcctgatctttgtggtgctgactgtctactcggcgctcttcggggttgtcgtgtggatcgtgatcgtcggcttgctccgcatgatggcgaagtccgatccgctgatgcggcaggtctatgtccggcacatttcctacaaaccctactacaaggcgaccacctctccgtggcggcggtattgaggaggctgatatggtcgcgctcaaacggtttcgggcaaccggcccatccttcgcggatctcgtcccctatgccggcctggtcgacaacggcgtgcttctgttgaaagacggaagcctgatggccggctggtattttgccgggccggactccgacagcgccacagacttcgaacgcaacgaactatcgcgccagatcaacgcaatcctgtcgcggctcggaaccggctggatgattcaagtcgaagccgcccgtatcccgacgtacgattatccctcggaagaccgctgccatttccccgatgctgtgacgcgcgcaattgacgctgagcgacgggcgcatttcgcgcgcgagcgaggacattttgaaagcaagcatgcgctgatcctgacctatcggccgtcggaggccaaaaagacagccgctcagcaaatacatctactcggacggggagagccgtaggaagacctatgcggacactgtgctcttcatcttcaagaacgccatccgcgagatcgagcagtatttcgccaacaccctttcgatccggcgcatggaaacgcgcgaggccgccgagaggggaggggagcgtgtcgcccgctatgatgaactgctgcaatttatccgattctgcatcaccggcgaaaaccatccgatccgattgccagctgctcccatgtatcttgactggatcgcgaccgccgaactcgagcatggtctgacgccgaaggtcgagaaccggttcctcggtgtcgtggcgatcgacgggctccccgccgagagctggccgggcatcctcaacagcctcgaccttatgcctttgacgtatcgctggtcgtcgcgcttcatcttccttgatgcggaagaggcgcgtcagaagctcgaacgcacgcgcaagaagtggcagcagaaggtccggccgttcttcgaccagctatttcagacgcaaagccggtcggtcgaccgggacgccatgacaatggtggccgaaaccgaggatgccatcgcgcaagcgtcttcgcagcttgtcgcctatggctattacacacccgtgatcattctcttcgacagtgatcgcgaagcgctgcaggaaaaagccgaggctatccgccggctgatccaggccgaaggatttggggcgaggatcgaaacactcaacgcgaccgaggcctatctcgggagcttgcccggcaactggtattgcaatatccgcgaaccgctgatcaacaccagcaatctcgccgatctcattcccctgaactccgtgtggtcgggaagcccggtcgcaccttgccctttctatcctcccaattctccgtcgctgatgcaggttgcaagcggttcgacaccgttccggctgaacctgcatgtcgacgacgtcggccacacactgatctttggtccgacgggatccggcaaatccacgctgctggcgctgatcgcggcacagttccgacgctatgatcgttcccagatcttcgcctttgacaaaggaagcgcgctcctaccgctaacgctggctgccgggggcgatcattacgagatcggcggcgacaatgcggaagggcgtaaggcactggccttttgtccgctgtcggatctcgaaagtgacgccgatcgggcttgggccgcggagtggatcgagatgctggtcgctctgcagggtgtcactatcacgcccgatcatcgcaatgccatgtcccgccaggtcaccctaatggccagcgctcccggacgatcgctctccgatttcgtgagcggcgtgcagatgcgcgagatcaaggacgccctgcatcactatacagtcgacgggcccatgggtcagcttctcgacgccgagcacgacggactatcgctcggcgcctttcagaccttcgagatcgagcaactcatgaacatgggcgagcgcaatctcgtccccgtgctcacctatctgttccgtcgcattgagaaactgctcgacggctcgccgagtgtgatcgtgctggacgaggcttggttgatgctcggccacccagtattcagagccaagatccgcgaatggctgaaggtgctacggaaagccaattgcgccgtcgtcctcgcgacacaatcaatctccgacgcggagcgttccggcatcatcgacgtgctgaaggaatcctgcccgacgaagatctgccttccgaatggagccgctcgcgaacccgggacgcgcgagttctacgaacggatcggcttcaacgagcggcagatcgagatcatttcgaacgccactccgaagcgcgaatactatgtcgtcacccctgaaggccggcggctttttgatatggcgctcggtccggtggcgcttagtttcgttggcgcatccggcaaggaagatttgaatcgcatccgaacacttcattccgaatacgaccgcgactggccggtccactggcttcagatgagaggatttcacgatgccgcgtcgctgttcaatgtcgaataatttgctcgccggtctggcggtcgtcgccgtaacggtcggcacaggggagccggccgatgccggcaccgccactggcgtcgcaaccgagtggacgcaggttctcaacaatggggagctggttgccctggtggggaagtccaatgagcaaattcagaaccagctcacccagatcagccagttcgcacaacagatcgagacgcagctgaacatctatcagaacctgctccagaacacggcgacgcttccgtctcatatgtgggggcaggtcgagcgtgatctcaatcggctccgcagcatcgtcgatcaaggtcagagcatcgccttttccatgggcaacgccgaccacgtactgcagcagcgattccagagctatgcaaccctcaagaccaacctgccaaggaatgagacattctcctcgacttatcaagcctggtcggacaccaaccgcgatacgattgccagcacgctgaatgcggcgagcctcacggccgatcagttcgacagcgaggaaacgacaatgtcctcgctgcgctcgatgtcagagaccgctgacgggcagatgaaggctctgcaggtgggccacgaaatcgcggcccaacaggtcgggcagatgcagaagctccgcggccttgtctcgcagcagatgaccatgatgggaacctggctccagacggagcagaccgacaaggacctggcgcaagcacggcgggaaaaattcttcaacgccgacgtcaagagcattccggaaggtcagaaaatggagccacgctggtgagccgcgccgttatcattgccttagtgatcctcgtcgctgcggtttcgaccacagcgacagcgctgatcgtcaactccagagcctccaacccatccgcacctgaggagcaacgcaccgccaaagaaaaattcttcggcgcggggaaggcgcttccgccgatcaaggatggtcaggagatgggtccaagatggtgaagatcagtcttgcacgttcgttgctgattgcaggcttggcttatgtcgccttcgaggcacgcgctttcgcgcaggaaggtctagtcctcacggagttggagaaccacgtctcggcagccgcgaaaggatgggaaaccaccatccttgacgcggcgaaatcgttgttttggattttggccaccatcgagatcggcatcgcggccgtctggctggcgctccaggcggcttcgctcgacagctggtttgctgagcttgtccggcggatcatgttcgtcggattttttgctttcgttctgacgcagggcccgaccttcgcgcgcgccgtgatcgatagcctgttccagatcggcgctggcggcggatcggcatcccccgctgaaatcttcgacgctggcattcgggtcgcctcacaaatgtcgcagcaagcccagttcggcgtcttcgaggacaatgcgctcgcaatcgctgcggtgctggcgatgggtgtcgtggtcatctgcttttcgctggttgcagcaattttcgtgtcggtcatggtcgagatgtatgtcggcctgctcgctggcatgatcatgcttgggcttggcggttcctctttcacgaaagacttcgctgtccgatatcttgtctatgccttcggcgtcggcatgaaactgatggcgctcgtgatgatagctaagattggatcgcaggtcctcttgggcctggcgaatgctccaaccgcgtcttccgaccaatttgtcacgaccctggcgatcgccggcatctccgtcgtggttttcatcatcgccatgtacgtgccgagcatcatccaaggtgtagtgcaaggcgcctcggtttccggggggatggaaacgatccgtcacggcggccaggcggcatccttcgccgccggcgctgggttcctcgcgggcggcgccgcgagaacgggtttcacggccggtcagtcggcacgagcggcgggttcatccctcgccggcgcggcgcttcggggtttcggcgcggggatcggatccgccagcagtgctgctggttctgccgccaaggaaaaggcgatcggttcacccggcgcctatgccggatcaatcctcggcctcgccaacgccaagctcgatgagagccggggcggtcatagcgggcacaagccacctcccgaacgcaaagactaacagcaatcagaaagtgatagacgatggcagcgaaccgcgcccccgaaaacccctatcttgccgcgcggcaggaatggacggaacgatacggatcctatgtgcgagccgccgcggcatggcgcacagtcggcattctgggcctggccatggccgtgatcggtttcggatatgctatgtatctcagcaccgaggtcaagctcgtgccttacatcgtccaggtcgacaagcttggcacgtcggtcacgaccggtttccccgaacagattgaatatgcggatgtgcgggtagtgcgcgccacgctcggcaatttcgtgaccagcttccgttcgatcacgccggacgccgcggtgcagaaacaatatatcgaccgcacctacgtgctccttcggacctccgatccgtcgacggagaagatcaacgcctggttccgaggcaattcgccattcgagaaggcaaaaaccgcaacggtcgcgatcgaagtcaacaacatcgtggcgctctcaaaccagacctatcagatcgactggaccgaatacgaacgggaccgcaagggcaaggagatcggcacgcgccggttccggggcatcgcgacggtgacactcaccgcgccgcaggacgaggcaaccatccgcctcaatccaatcggcctttatgtcagggattttgactggacagcgcagctttaagggcaggggaattctcaatgcacagaaccggattgatcgcagccgccggctgcctggcaacactcgtctttgcgagcgccgctgaagcgcagagcatgaccaccaatgaggtgaagggcaccagtatttcgaggaaatggcgcggcacggccgggttggtgacgactggtcccgacggcaaggtcatcttcctgttcggcgagacgcagccgtcggtcgtctgctcgcccttgcaggtctgcgatatcgagttgcagggcggcgaaatcgtgcgtgacgttctcgttggcgatagcgtgcgctggaaggtcgaaccggcgacctcgggtgccaccggcgggcaggcgatccacctgatcgtcaagccgtcggagccaggccttgtcacctcgatggtggtcacgacgtcgcgccgcacctatcacatccagctgaaatcccatccgagccagtatatggcgcgcgtcggtttcgagtatccggaggacgtttcgacgaagcttgctgacatcaattcaaggctcgagaccggcggcattccaggaacggcacccgacaagctgaacttctcctactcggtcagcgggagcgcgccgtggaagccgaaacgggtctattcggacggcgcaaaaacctacgtccaattctcgaaatcgatctccggacaggacgcgccggtgcttttcgtcgtcagcggcggccaaaaccgcatcgtcaactaccgcatgaacaatgacatgatgatcgtggactacgcggtcgacaaggcgatcctcgtctccggcgtcggctggcggcagcagaagatcactattcggcggggaggctgaacgatgcggaagcttctgatctcctttgttacggtggctattctttccggctgccaaacggccgaggacgggctgacgaccagttccacgccaaccaccgtcaccgggcccgcggcgagcgcgattgccggcgatatggcaagccggctcgccgagcagatcggcccgtctgcgacgatgaccatcaagatcgaaaaagactcgtcggatttcgcgagcgcgctcgaggcggcgctgaaaggctggggctatacggtcgtgactgatggcaaggtcggcagggtcggcaaggacgtgaaactggtcgagctcggctattcgatcgacggtgttgacggtcaggtgctcgcgcgactttcgacgccctctatcgcgcttggccgggcctacacggcaacggcagcgggtgctgtgccggcaagtccgctttccatcatgcagcgcaactgacggagacagatatggtccagtctctgcggcttggtgccgccaacgaggccgaagatcagaacggcatgcgccgtctcaatcgcctgccgatcatcgtcgccatcgtcatcgttgcgctgttcgtcggcttcgtcgtcatcggactggcatggcgcggtcttccgttcaaccgcaacaatgatatccacagcgcatcgaataccccggcaacgaatttcggcgaccagctcaagcgcggcgtcaccgacggtatcatcggcgagccggtgaaacgggaagcgtttcagccgacgcccaccatgaaacagaaggtcgacaaggaaccgactgtcgtcgaccggcctacggaaccggaagagcgacgcccgcggctcgaaaccgaggaagaatggaaggcgcgcctgatgcgcgagcaggacgaacaaattatccgcgaggcccagcggcagcggatggcccggctgcaggcacgagcaacggctttggactcgccgttgaaggtggatatttccgaaggcgagaaagcacccaagaactccacggacacgggtcaaaatcccacggcgacagaaaacaatgcctcggacctctaccccgccgccatgaaatcggggatcatgggcgagaacctcgatccgaacgcccaggcgtcgaaggaggatttcttcaaccaggacatcaaggatgatggctacctcccaaatcgggtcgtgccgcagatgtcggtctatgagttgaagcgcggctcggtcattcccgccaccttgatcaccggcctcaattccgacctcccgggtcgcatcacagcgcaggtcagccagaatgtctatgacagcgccaccggctaccggttgcttatcccgcagggcgccaaactgttcgggcgctatgactcaaaggtctcgtttggccaggagcgcgttctcgtcgtctggaccgatctcattttcccaaatggatcgaccctgcagattggcggtatggctggcacggacgccgagggctatggtggcttcaaggacagggtcgaccggcatctctggcgcacttggagttcggcagcgctgatcgcgctgattgggaccggaatcgacatgtcgatgcccgagagctcgacgctggcgacacaggatactgcctcagacgccgtacgccgaaacttcgctgaatcgttcggccgggtggctgagcagaccatatcgaagaacctgaacgtccagccaacaatccgcatccgacccggctataagttcaatgtcctcgttgaccaggacatcatctttccgtccgcctatcgtgacaattagcggcgcagggcccacagatctgatctccgtatctgccgctggttggcgcgcggtgtggcgctacaatcactgcagcgcaaaacctttcctcacttgtactatttctaggccgacgtggcttgaaagctgcatctccacaggtagtgctaatgtacacggtccgagggaatactccgcatgctctattaacctgcggttgccgcaaaaagtaattgtgtgcgtaaatcgcagtcatgacccgattgcccaaacggccgctcgtttcgcaaaggacgagctcggcggtcaagaagataggagagatgtccgtgaacggaaaccttcgctcgctcatcgatatgctggaagccgcgcaagatgggcacatgatcaagattgctcttagaagcttcgcgcattcctgcgggtatgacaggttcgcctacctgcaaaaagacggcacccaggttaggacgttccattcctatcccggaccatgggaaagcatctacctcggtagcgactatttcaacatcgatcccgtgctggcggaagcaaagcgccggcgggacgtttttttctggaccgccgacgcttggcctgcccgaggatcgtctcctcttcggcggtttcgtgacgaggcaatcagccacggcattcgctgcggcgtcaccattcccgtggagggaagctacggatccgcgatgatgctgaccttcgcatcgccggaaaggaaagtggacatttcgggcgtgctcgatcccaaaaaggcagttcaattgctgatgatggtgcactaccaattgaagatcattgcggcgaaaacggtgcttaatcccaagcaaatgctgtcgccgcgcgagatgctttgcctggtgtgggcttcgaagggaaaaactgcgtccgtaaccgccaacctcactggaatcaatgccagaaccgtgcagcactatctcgataaagcacgtgcaaagcttgacgcggaatcagtgccgcaacttgttgcaattgccaaggatcgcggcctggtctgagttctagttgtcatcgtcgaaaggcacgtcgggcacaaagccaagcgcgtccagaatgtccgatagctcctcctgttgggcctccgacctcttctggcgtgcaacgtactcatcctggagcgtctggaggaccggaccggaaatcgacggatcgtcgcttgcgcgcaaccactcctcgtaaacggcctgatcggcccagaggagccggcggtgttcgcgaatcgcggaaactgccagtgcctcaagctctgacttggtcatgacactgtagcgcgcttctttctccttgttttcgtcgttcacctcggatgagcccatatcgttcatccgcttctccctgatttgatttcctcactgcccagcacccaaggtcggcattgtatcggtctagccgctacagccaaattctctgggctgaggcaaggcagttgaatctaaactcgacatttaaacaactgcttcgagccgacgggcgttccgagccgccgcgtttacatactttagttgataaacttatggtgtgtaaacgacgatctttcagcgcatggatatgcgcaagctggtcggctctaatttcgcccgcctgcgtcgggagaagggcctgacacaggaagaggtcgaagctcgttccggtttcagccaacaatatctgagcagccttgagcgcgggcgacgcaaccctaccgtgattactctttatgagctggctcaagccttgggtgtaagtcacgtcgagttggttaccccgactgatgagactccgtttggcacgcgatgaggcgaataatcctactgcagggtaaaatcgagcgtatgcgccgcttacatcccattgatttcgcgtgtttgtgaacattgtgattctgccagaaggttttcggcaagagctggagatttgggatggcggatggtgatggttgcaaggcgtcccatgcgaagagccgttttgatgcggctgttctcacgcagggtcagttcctccgatagaaggatgtcgattgcttccagggctgagagttcgccatgctcgaggcggcggaccacgtggtcgagcgcctcgagagcacgcggcatcttgaggccgacgagatcgtgacggatgcgttcgatcatcgacggcatagcatcaagggcggcgctcatcggcgggtctcccgagccatagccgttgcaacagcgtcatgaccatgccgtcacgcgagattcgccgctccagcttcaggaccgatcggaacagggccaggggaagtggccatagatgagatcgctcttcggcgaaagcctcattgacgacgcgcaaggtcgtggcatgcaccctgggattggcgacggtatccagccaatggcgcagctgcgcgttcaggtcatcaaggttgcggaacgagcgagccaggaagaagtcttcgcgtatgtagcggaatggcctctcgaccttggctttctttcaagtccaggactgcagttcgtactgacactcaagcgcgtatagaattcgaggtcacgcacccgttccatcggtggcgcggccagcgcttcgtgttgtcgacacgcaagcagagctggggcgaggaccgcgtcaacgatacctgcagggtctgcgcaggttgatctgctgcgcgcactgatgggtggctataggagctgatgggtaactgtgagtcctaagactgcaagttgatatataagtccatataagtcagcgttttgatacggttttgtatatcgacattgcattgctctctaactccctatatattatcctgtatggttcgcatcctgcgatacaggataatgatatggcatataaaacggagcatataacgcagcagctgcgcgctgcgcgcgaagcgcagaaaatgagccagcgcgagctgagcgcacgatcgggcctgacgcaaagccatatttctcagatagaacggggcaccatggagcccggacttggcagcctagtggatgtggcgcgcgcgctcgacctcgagatagtccttgccccgaaaaaactgatgccagcaatccgcaatatcctcgatagtgcatcggcatcgagtgatgtcctgacatccgaccagcgcaaactggtggggcgccttgagcggtggtttgcgcagcacaggggcgggttcggtagtgcttccgaggcagatacattcaaagatagcctcgcgctcttacggcatcttcctctgtcggccgaggagatggacacattcaacgaggcgactgcacgcctcgaccggtcgcaggctgatcctccatcccgtcaggaactgagcaggatcgcacatgccgtaagacacctacgcaacgccgcggtgcaccgcgaccgtgacgacgcggtccctcgctcggcctatgcgctggatgaggaagacgataatgcctaaggtcacggtactcgatgtcaggctgtatggggaaccggtttcgaccctgacgaatctgcaggacgggcgcaccatcttcgcgttcaacgaggcttatatcgaagacgaaaagcggccgacgcttagcctgtccctgaaagacccgttcggggcgctcattacgaagttcaggccgtacaacatggtggtcccgcccttcttctcgaacctactgccagaaggaccgctgcgcaaatacctcgctgatcgtgcgggtgtgaagccgtcgcgtgaattcctcctgctctggatgctcggccgcgacctgcctggggctgtgacggtgcatccctccgaaggggatgacgcgcctccggatgacgagcaggctatcgtcgaagcgcggccgaacgcgctacgcttttcgctggcaggtgtgcagctgaagttctcggcctttaagaacgacaaaaagggcggcggcttgaccattccggccgagggcacgggtggctcgtggatcgtgaagctgccgtctcagcaatatagcggcgtgcccgagaatgagttcgcgatgatgaccatcgcccgcatgatgggtatggacgtgcctgagctccagctggttgatctcgacgccgtaagcggcctgccgcagggggtgggtgaactgcacgggcaggcgctggcgatcaagcgttttgaccgcacgccggagggagcggtgcatatcgaggactttgcgcaagtcttcggcgtctttcccgaccacaaatacgataagggcaattaccggatgatcggccgcgtgctggggatcgaaaccagcacggccgacgtggcggaattcatccggcgtctagtcttcagcacgctaatcggcaatggcgacatgcacctgaagaactggtcgctcatctatcctgatcgccgcacccctgcgctctcgccagcgtatgacttgttgtcgactatcccttatatcgagggggaagatacggcggcgctcaatttctcccgcacaaaaaagatggcggcgctgtccaaggacgagctggcgcatctggctgcgaaagcggagctttccgaaaagctggtgatcgacacggcgcgcgagacggttgaacgttttagggcggtatgggaggcggaaaagaaaaatctgccgatggccgccaaggtcgccgacacgatcgatacgcacgcaccgacggtcgagctgtatcgtgagttcgcgaagtagtgccttgcggctcggcattcaaattatcgagccttgctgtatattcaaggcgttagcccatccaaagcatggccgttggttcgaatcccatcaagacccacaaggcggaaatggcacatcggccgcataagtccaaaaactccggccgacgaagtccaggtcgagtagccagcctctttcctgcgacatgacgctgacatcttgaaggcccaccagatgaaagtcgctccgaaaaccggggcgtccggttacagttctttggacccgacgacggaggtcatgatgcggggatcctttaacgacctggtctatgcgcaaaatggccgcactctcgtgaaggaaatctgttccgtgagcaagcgatcgtcttcgtggagcgaaagcgactcgacgcggaggatctcgtcgcccgcatcacttggcaggcgttaagcaaatgccttgttggagagatgtatgtgaatgcggcgcgcgagacgtttttccgcacggcgaaaaacaagggcctccttgccgaaccggagatgtcattgagctcagttggccggttggctaagtgactgagcttccgcttccaggaacgcggacggcacgtgccttggagcgggctcatccacgcctggtcgatcaagatcgtttacgacagcactggagcggcggcttcgttgcctttgacggtgtgcaagccgaccaaggtcaatgtggcaagtggatgaatcagccatttggagccgaaggtaatagccgcaccgttgccttgtgttcgagatgattgaggacagacatcagggcaagggccatgcccacaacaacgacgccgatcgccgcgccgagcggccaatcgaatgagacgcccatcaagttgatgaccacgccggcgatcatgacgccctcggcaccgccgaccaatgtagcagcaataaaatcaccgaagccgagagagaaggtaatggtcgcaccagtgatgatacccggaatggagatcggcagaacgattgaaaaatttcccaatcggtcgcacccgcctccttgcccgcctcgatcagttcaggaaccggttcatgtagatgaccgagagcagcgagcttgcgaccccacctagcggcgtgccacgcgtgctgcttttgccgccgctcatgcgccggttcccgtcaccgtcccgctcttcgaccggcgccttaccgaccgatcccgaatggtcgggatgccgagcgggcgctcaccgccccccggcttcgggatcatcacccgtcgcaccagctgtggccggtagctcttcgagacgagttcctcccgcaggcccgccagccacccttccacgccctccgcctcgatttgcgcgaaggtcaccccgtccacgcccggcgaacccgcattggcgcgggccaacccataggcatggcgcagcatgtcctcacggcagatctggtcgtagagcacgtagaagcggaaagcgggctccgccttcgccttgcgatacagcttcctctgcaggttcctgatctttcgggtgtttcgagggtcatcgccaatcaccccctcctcaccaacatcgaaagcacatcagaagtcagggcccttccctccaccggcattacccggcttcagcggtattatggccctgtccgactcccgttcgcaccgccgcccttggctgcgttgggtctcccccgttacccgcatcacccttccaacgtgccgtgcccaatacccgggtggatcgaacgggtgcccatgtcgattgcttccccgttcacgcggccttccccgaatctcaggcacgtcggcatccacatcatcactttcgaggcctgctcaggctttactcgcattacggcccatcggatcgctcaaccgcccaaggtggcctttgtcacgaggcttcgacccggctagttacccaaccgaaccggtcgctagctacccctatcgacaactatctgggtggaaccttcctccactggtgatacgcgccatcggggcgcactgagagattcgggttaggcctcacgttcccccgatgcgggaaagatcgatccgcattgctgccgatccaacgctgtcgtttccctcaggccattcagaggccgagtcttgagtatgactatcgcggtcatccgaccgcaacacttcttccgtcgcaacgctgccacccggatcaggagcctgaaacacgctcacgccttcgaactcacccgtcttccatgcgtagacagcatcctcgaatatttgagggatgacgtcgtcgctctcgggattgccatacgacttggcaacgatcctaagaaccttggcaaacatcgaggttcccttgcgaaggttttcgcaggcgtcgacgaggtccggctgaaggtctgctgcgttcttcacgccgacgcccactggaaactgtgtcaggccgacgcgaaccaccgcctgacccacatattgcctcacgattgccatcgcctcgccggcggaagtcgctttcggcacgaggatcaatcgtccacccgattcaactgaaacggcgagcgggtccgtcgagccggcggctgcgacgaactgctcgacgatcgcgggcttgagagaaggatcggcgcattctttgattagggcagcgtcgagcatgacgtctcctcgggcttcaggtgttgaaggaaagaacaagcggtttcgcgaacagctttgcccaagcgatcgcgttgactcgctgaatcgcgacgatggatgtccctttggtccaccatccgtttccgactgcgacgatcaggtccggctcgtagagcatcgattgcaaagtgggccagacgacgagctgctcgtaacaaatcaggggagcgacccggctattgcctacggtcacgacagggttggcaaagaagtgcgcccgggcgccgtcgctctcaccgagccacgatccccatggctgccacatggagcccgggaccggcattcgctcgcgatagaggaccctgccgccatcggccgagagggtgaccaacacattgtcgtatccggtcgcgtcgatcgccgccgcgccggagatgacggagatctccgtgccctgcagagccttgacccagagccgttcgaaggtcggtgtccagaagcccaaggcgctttcgggcagaactacattccggacgccaccagatgcgcggtccttcaccgtggcaatcagatcacggtgacgctgaatgctggtgttccggccgagcgttgaccccagtttgagatcgacgccctgccagctcgcaggtaatttcgactcggtccagtttgcggcggaccaaagccaaaagcctgtgaaggcgattgcgacagccggccacatgcgggttacgaggcccatgaggccggctgtcgtcgcgaccagtccccaccatccccatcccggaaagagaattcccgcggccgtgacaggatgcgcccagccggtgatgcccattggcggcacagccataaggacagccgccaggagatagcgaaacggtcgacaatccgaacgcttcgtccagagcaccgtatgcacgacaacaaagctccccgaggcgcacagccacagcagcaagcccggccacagatcggaggtatagaacgccgcgacgccttgcggcagcccgcgtgacgccgccaggaagtatccagcggaaacgagtgccgctaccctccgcgtgcgcgcgcgcgaccaaagaattgggaatgccagtgcgaccggaagaaggagggcataaccgctccacccgaccgttccgactacaattgaagcgatggtcagcagtctcggctggaggtgatcacggcgcataggtcaggacttcttgcgccaggccgagaatgccggcggccgggatcggaccgaaataacgggagtcataggagcccgagaacggcgagtgcaggaacacgtaatcggtcggcacgattccgcccgagaacggcttcatcggccgtccctgtccgtcgcgcagagcaagagcggacgaggggacaggatgcccgtcgacgttgacgctgacccccacctcgacccgttgccctgcaactgcgatgaccgacttgatgagcggcgcgatgccgcccgggcataggccggcgcgcagataaccacgcattcgcgcctcccgcatggccgaggttcgaggcggacaaatgaagacgagatcgccgacggcggatgggcgatcgatcttgacgatacgccagagaccgagaggttcactcggcgtgagattgatccggtagccgccgaaccaggcggccgagatcgtgccgaccgccgccattgtcatcgtggctaacccgaggaggagcggcttaccgcgtcgcctcctcgaggtcaattcaacgagaggaatgttcatttcagcgacagcccctggctcttcgtctgccgcagcgtctcggcctgctttagggcttcgatcgttcgctcatgggcattgagttgctgcaccgtacgcatcgtgttccaggccgattggacctccgccttcgggcctgggttcattccagctgtgatcgtcttgaacgtttctccgttcgtgtccttggcggccagtggcaggaaggcgcgctccccgaagcgctcggtgaccgccctggcaaagccttccaattcggccttgacttgtctgtcggcgagagcaaactccaacgccgcgggtaggtcattgcggtcgatagcatcacgcacgcgctccagcgtctgcctggcgcccggagacagcgccggaatctcgatcgccaccttgcggcggactgccagttcatcggcctgatagcactgttcggcccggctgcgctggcgcatgtaatcgctgaggctctgggccagagccggtacatttcgttcggcccgctcgcggtcctgcttgtcggcacggcttgcgagcaagccggtttttcctttcagcgaaccgtaggattccggctgattggccatgttcgatagcgcggacttcgcgacggtctcgtccttcagcatcgcgtcgacattgaccgccttgaaggcgacttccggctgggtatagacgagatggaagcgggtcgagacatcctcccattgcttcttcaaaccgggatcgacttcgagtctgtcagcgactgcctgctccatcgatttcgggaaagtcgcgataccggcaaccatgggcctggtctccttgaggttttgcgagttggttgttttggcgcccacggcgagaccgaacctcgcgccgatggcgacgagccgctgagtcagatcggccagtttctgtttctgccggacggtccactcgagccggtcgcgggcaatcgtgcgggcgacattgacgaggtgcatgccgcgggcttcggcgaagcgcagcgcctgccggtagaaggttgccttctcgtaatcgagcgtggtttccttcgaattcttctgcgacaggatctggatgaggccaccggacttcgcaaaggatcgggcgccgtaatagaccccgagatcctcgcgatggcgggtcatcgcgacataggtcagatgccgatcgagggagagcgaagccagcaccttcacccggtcgacggtggccccctggctcttatggatggtcgtggcataaccgtgatcaagattgttgtagaagcggctctcgaccatgacctgacgccgatgctcgacttcgccgatctccgcgacgatgcggttctgagcggcctcgacgaccttgccgcgcatgccgttcttgacgccgagcgcgccctcgtttttcaggaagacgatctggtcgccaggtgcgaagcggcgatttccatcctccgccttgaatgagaaaccagcatcgacaatgccacgctcgacgagcttggcgcgcgccatctggttgagcatgcgcacatcgcgccgaaggtgcgcgaggatcaatgtcgtcttcgtcggatcgtaatcccggtcccagtccgcgatcagattctgaacagcttcagccttgagctcggagcgcatcatcctgccatttgcacgataggtatcgactaccttgccgacattgccacgtgcgaggtcgagcgacgcatcgcacatccactgttcgcgctggcgatagatggtctccagttcggcataaccgatccgatcggcaatggcgcggaaagctgcacccgcttcgatcggctgcagctgttccggatcgccgaccaggacgagcttggcgccggccttcgtcgccgtttcgacgaacagcgccatctgccgcgatgacaccatgccggcttcgtccagcacgaagatcgtcttgtcgtcgagctgctttcggccttcgttccagcgcagctcccaggacgacaacgtgcgagacgcgattcccgcttccttttccaaaccttcggcggccttgcccgcaagcgcaccaccgacgacacgatagccggccgcctcccatgcttcgcgcgcagccttcatcatcgtcgtcttgccggcgccggcgcggccaatgacggcggcgatccgctcggctccggccacgtgctcgatcgccgtcttctgttcgtccgacagacgggaatggcgactgaacgccgcctctagcacttccttccgaacgccatgcgaggatcgcctcgagagccagatcgctcgggatcccatctccgcttcgagccggatcagctcgcgcgtcgtgtattttgctggcgcccggatgccggtcgcaaacgcaatccgctcgcgttcgagacggagcgttttggggctctggagaatgcgggccatcaggctatggaagaccccggggtcgtcgatatagcgatgcaggatcttcgccacatcacgctcgtcgaagacgctcttctcccgggtgatcaggtcgaggacgatttccgggcggcgctggatgcgtcgagcattctcggcgcgtttctcctcctgcagctccagccgctcaagcgaaacggcctggtcatcggtcgtcgctttccgctcgatcgccttggtgcctaccccgagatgaatggtcggggtaagctcgatgccctgcttctcgaacgaacggccatcgatgcgaatgtcgagaccggcaagtgcgagatgccggttctggcaggcaaaccagccgtcgcgaaacgcattgaagtcgtccaggcttccggcccacagttcatagacgatcttgccggcatcgttgcggagcgaattgccgtccggcccaacaaccgcaagtttcttggccccgaacccatcagcagtcagcggcctcaacgtcgtcatcagatggacatgcgggttgcccggtgcatcgtgatagacccagtccgccaccatccccttggcggtgacatgccgctcgacgaagtcacgcaccagcacgatgttctgctcggttgtcaactcgatcggcaacgcgatcgtgacatccttggcgagttgcgcgtcggagcgcttttcgaaatcctcgaccttgttccagaaggcttccgaggcgctggcgaccgagcgatcggcgatcatcgaccgcaaccactcgggtgattcggctggaatgacgaactcttcgtgaagaagaccctgcttggcgcgatagtcgatcgtccgggcttcccgctcatagtccatcctggcgcagtgccgataggccgccgacagcacggcgctgcggccggagccgcgggcgacgacgctgacggagaaatgaggaacggccacggcagagtcttcccgattgcacacgaaatcaatgggttcgtcgggagcggtggccccgccagggccgcaaaacaggatgtcgcgacagcgacgtataattgcgcccttggaagccgctccttcggaacggccgggatcattcaccaaagcatcgcccttggcgattgtaggattcacagtagtgcgttccgcactccgctccgaaaaactggcttcgaaagacaagctttctcagccacggagacggacggaatgaagaaacctgcctcgaaaattcgcgacgaaatcgccaagcttcaggaacagctcagacaagcggaaacccgcgaagccgagcgaattggccggattgcgctgaaggcaggacttggcggaatcgaggtggaggaagccgagcttcaggcagccttcgaaagcctggcaaaacgctttcgcggaggccaagggggagcgaacggggcttcgagcggagggaaaaagccagatgggaatgccacggccggcgcatcggccgcggcggtcgggtctggcgcggctcagggcggcaatggcgaggcttgagcggatggcgaggtcagcgacatccgacgcccgcaaaaaggacacgcgggagaagatcgaactcggcggcctgatcgtgaaggcgggcttgcgatacgagaagcgagtgctcctgctcggggcgctggtcgacctcagccgccgtctcaattccgacgaaagcgagcgcgcccggttgatcgcgatcggtgcggaggcattcggcgatgacggtgaataggatcgcactcgtcgtcgcccctgtcgtgctgatggttttgaccgtcatcggcatgagcgggatcgagcaatgcctgtcgaccttcggcaagactgacgctgcaaggctggctctcggccggatcggcatcgccttcccctatgtcaccgccgcagcgatcgcggtgatcttcctgttcgcgagcgcggggtcggcgatcatcaagttggccggctggggcgcgttggcgggaagcgcggcaacgatgttgatcgcgacgatgcgcgaggcgtcacgccttgccgcattcgcagcgcaggtgccggcgggcaagtccattgcctcgtatcttgatcatgcaacgctaatcggcgcgacggcggcgttgatgtcgggatgtttctcgctgcgcgtcgcgctgatcggcaacgccgccttcgcacgcgccgagccgagacgcatccggggaaaaagggcgctgcacggcgaagccgactggatgaacatgcaggacgcggcaaggctcttctccgatgccggcggcgtcgtcatcggcgagcgttatcgtgttgacaaggacagcacggcggcgcggtcttttcgggccgatgatcccgaaacctggggcgccggcggcaagtcgccgctgctttgcttcgacggttcgttcggatcctcgcacggcatcgtcttcgcgggttcgggcggtttcaagacgacgtcggtgacaatcccgacggcactcaaatggggcggagcgcttgtcgttctcgatccttccaacgaagtggccccgatggtctatgagcatcgcaaagcagccgcgcgcttcatccgcattctcgatccgaaggaaccggaaacaggattcaacgcgctcgactggattggccggttcggcggaacaaaggaggaagacatcgcctcggtcgcgtcatggatcatgagcgacagcggcggcatgcgcggcgtgcgcgacgacttcttccgggcatcggcgctgcagctgctgaccgcgctgattgccgacgtctgcctgtccggccacacggacaaagagaaccagaccttgcggcaggttcgggccaatctggcggaaccggagccgaaactgcgcgagcggctgcagtcgatctacgacaattcaaattcggatttcgtgaaagaaaatgtggccgcgtacgtcaatatgacgccggaaaccttctccggcgtctacgccaatgcggtcaaggaaacccactggctgtcctatccgaactacgccgcactcgtatccggttcgaccttctcgaccgacgcgcttgcggccggtgaaaccgatgtgttcatcaacatcgacctgaagacattggagacccatgccggtcttgcgcgtgtgatcatcggttcgttccttaacgccatttacaatcgcgacggcgaggtaaaggggagggcgctcttctttctcgatgaggtcgcgcggctcggctacatgcggattctggaaaccgcgcgtgatgccggtcgcaagtatggcatcatgctcaccatgatctaccagtcaatcggccagatgcgcgagacctatggcggacgagacgcggcgagcaaatggttcgagagcgcgagctggatttcgtttgccgcgatcaacgatccggagacggcggactatatctcgaggcgttgcggcatgaccacggtcgagatcgaccaggtcagccgcagttttcaaacgaagggatcctcaaggacgcgctcgaagcaactggccgctcgaccgctgatccagccacacgaagttctgcgcatgcgcgccgatgaacagatcgtgtttacggccggcaatgcgccgctccgatgcggccgagcgatctggttccggcgcgaagacatgaaggcttgcggcggcgaaccggtttcacaaggtcggaaagatgtctgaagcccgcctgatccagccggcgcgcagtgcaacgagcaaggcggatccaggagcatgaagagtatcggagaaatcagcgtgagcgccgcccaacaggcgggatttcgggcattctcgtcgtgcgaggagcgggaaacagggcagccgcaggagcctcaacatagtggcccgaaggggaggcgggaacgactgctccccgcttctgcacacagttttgtctcctgactttagccaacacgtcaaaagcggacttgctgtcggcttcgctttcgatctgcggtgatggccgccacatcaactgcgtcgtcgatggcggttctggttcgagggcgaaaaaatccgcattgccgatttcgacacacctgagtcgcgccctccgcgatgcgaggccgaacggataagggggaggaggcgaacgcacgccttctcaccctgctcaacgcggggacattctcgctttcaaccgggttacgagatgaggacaagtatgggcgcaagctccgcacggtgacacgagcggggcgctcgctggggcagcacgctcgttcatgagggccttgccaggcgctgggacggtgtgcgacacggctggtgtgactgagaggtcgcgagagaatcgtcacccgacggggcggggaccgcgggcgggctccgtgagcgcagcgagtagagccgtgcgccataggcgtctcgcccaacatgctctttctcataacatcagcgatatgaatcgatccgtgcccaccgattcacaagtgtcgttggacgcgatagtcgggatcagcgattctgatctcatgatctcgcaaccctaccggctctatgtcgagcgcctggatccctcgaggaatatggcccgctactatgccatgtcgatcgaaccgaacctcttcggcgacatctgcctgcttcgcaagtggggtcgcattggaaccaagggacagatgatggtccatcatttcggccaggaagaggatgcggtccgattgtttctcgatctgctccgacagaaacgaaaacgcggttatcgtccgcgaccttccttgccgaaggaaaaatggcccgccgaagcggagcacgaaagcgctacatccgcgccggttccagatccggaaggacacttggatttagatgaagaacggaatcttgatggcgagctttagaccgagctttcccttccggaaggaatggctgctcacctttgccgaggacgcggagccgtcggccggcgcgaaatgttgcggggttccggcaagaagccgatccaacgcctggcgaaggcgccagccgcgacagcctcatcgaagacatcggaatggcgcgccaccaccgcttatgggttcctcccggccggaggggacgtccggcctcactcgccccggtacgaatctcagggtgtgctatctgacccggctgatctcggtgagcgatttgcggcgcgcgatgaactcgcggaggaggggaaggaagaacgctttgctgaaccgcccgatcggcggctcgggctcgatgtaaaaggagcggccaacgatataggtgttgaattcatcgaagatgatccagaggcgcaggtctgcatcgaggccggcccgccgcttctcgatggccggaatttcagccgcgcagcgagcctgctcgggctgcttggtggtgatcgggaaaaacagaaccaggtcgtcatcaggtcgggcaagcctcacgccgacggcgactggccgatacttccgccgctctatctctccttttcgggcttgccgcgcgcataaatagggataacggatgaccgtcgcggtctggatgccattatagctgctcatcgattggtctcgtcggtttccccataggcgtccaccgccgcctcgaattcgttgagcagctcgcccggcagggtttcgagtgtgccgactgaacgggcatcgtattgccgcatcagccgttcgtagtcgtcgatgttaaggaggacgaggcgcggcttgttgcgttgggtgatcgtgaccggatggcgcaacgcctcggcgatgatatcgccggacttccgggatagatcgcttgttgagtaggaaccaccggggcgaggcatgttgatctccagatgtctttgccggcgggcaccatagcatcagaaccgacgcaaatccggcatttacagtattgttgtaaatgctgtgtatttccgcggtgaaaggccccgcctggcggcgaggccttaatcgagagtatcagtcccggttggggcgggaccagatgagctggtagccatcttcgccttcgacttccgtcagcgtcgcgtagatcggggccgggaagctcgggtcgtcgagcttgaccgagaggtagtcacggtcctgctcggagcgcttctgccaggcggcgcctagttcgacggcacctgcgtaaatgcggaagtgcgggcccttgtccgagggattttcgatgcggccgatgcgagctttgacgttaagggcgagggtgcggattgagccggtgaagccgttttcggtagaggtgaaggtgccaatggtagccattgtcatgttcctttcgttgtttcgggccgcgcccttcgcggcctcgatggctgtcggaaagaccgggggcgatcggtccgcacctgaaaggccgaaacattgtggagggcgggcaggaagaactttgttgttccgtgaggaatgacggcggagccggcaggggaagaaagttctgaagggccgttgcgggaagccaatcgaggcgaagccgttctccggtcaggcatgcctcatcgagcgccagaagtgagcgccgcaacaatgaagagaaggaacatgggactggctacgctcgcgcctttcgatcgaatgtgtccaaacggctcataggtgaaaccgctccggatgcctggtcgtttgccgcgagcacctccgtatggagcttcgcagacgcgtgatccggccgcggctccagttcgggcgcgataccgagatcggcgcgtaggaagcaactaccaagctccgcgacatatcctgacagtcaagccgtcagcagcgacggggcgacggatttctcccagtaaacccctgtcaacagcgttgatcagccggcacagcccgacagcctggcgacgtccttgtcgaaagccagcgccacgagtttcagcccttcgacggtggtgaggtacggaaaaatcgtgtccgccagttcgtcgacggtgaggccctgccggaccgccagcgtcgcggtctggatgctgtcggcaccctccggcgcgaggatgtgcgcgccgagtaggcaacgggttccagcgtcggcgacgagcttgatgagccctcaggtatcgcgagcggcgagcgcggggggcacctggtcgagaccgatcgtcaagacagggaccgcatttcgctcggcgcgcgccgcggcctcggtcagcccgacgctcgccatctgcggatcggtgaacacgatcgccggcatggcgctgttgtcgtagcacaggccgtcgccgttgagggcgttcctcgccgcgagcctggcgccgtaggcggccatgtagacgaactggtcgcggccggtgacgtcgccggcggcatagatgccgacccgggtggtgcgcattcggtcgtcgacgacgatgccgccgttcagcgagacggcgatcccatggtcggcgaggccaaggccgtcgatgttgggggtgcggccggtcgcgatcagcacctgatcggcgtcgatcgcaacgtcttggccgtcgcgcgtgacggtcagtagaacgccgccctcgatcctgcggatggcgcggtaggcgatgccggagacgacggtgatacactcgtcctcgaaacccccgtcagcgccgcgccgatctcgggctcagcctcggggagcaggcgcgaccggcagacgagcgtcaccttgacgccggcgcgggcgaacatctgggcgagctctgcgccgatatagccagcgcccatgacgagcagcgaacgcggcagttcctcgaggtcgagcgtggtcgtgctggtcagatacggcacggtctcgatgccgggaatggcgggggccgccggacgtgcgccggtggcgacgatgatcctgccggccggaatgcgcgtgccattcacctcgacaccgccgtcgatgaggcgcgctggaccgacgcgataggcgatgccgttatagacggggagcaggtcgacatacttggcccggcgcagatcggaaaccagcatctccttctgatggacggttccacaccagtcggtcagttcggcctcggcggtgatgccggcaaagcgggcggcggcgcgtgcattgtgcagcgtctcggcggcgcggatcagggtcttcgacggcacgcggccgacattgacgcaagtgccgccgatggtgccgctgccgatgagcgcgacttgcgcgccctgatcggcggccgtgatcgcggccgagaagccggccgagccggcgccaaccacgacgaggtcataggcacctccattgcggccgttggccgggaagggccggcttgcgaccgtcgcgctcttcgatgccgcatcggaccggcaaggctcggcccgaaaagcgcgcggccggcctcgagcccttcctcgatcgacagccggaagcccggctcgtcggcggaacgtctgtcgcgccaggcggatagatgctcgtcagagcagaaaaacgccgtcgtcgcgcagagcgctgcgcagccgcgttcatagcggacagtctgccacatgacgaccgtcgacggcgcgacctcggccagcgcccgtcctcgctgccgcgtggtgatccggatcggcgcgccgcaatggcggcattgcgaggcaatagcgatgtcacgattggtcatggcgccgatgccgagcgcgtcgacggtgcacatggcgttgactacgtgtccgtacagcgtcacccgatggcccgtctcccggtcggtgaagggataagcgccgacgatctgctcgccgtcgagaacgaccagagcgcgccggcgaagttctgcgagcagaggccggatggccgccccgctgagttcggcgcgctccgcaagcgcgctccggcttggggctcgtccgtcctcggcatacttaaccagcgcgatgcgcacgcggtccgccgctgtatcatagccgctccagcgcttgagcacatggtcggagccgaccatggccggcagcgcgttccggactaccggcgacgtgacgaccgaccagttgggaaacgtcacgcccggccgcacggcaaagctcggcggtgtcgcgggcacagaaatgacagccttgtcctggggggaggatgcgcagcaattgtttatggcttcatgctcggacgacagcgcctggtcgcagccggtggcattctcggcgcgctcgccgcctcgtcctgttgcatcattccccttgtcctgttcagccttggcatcggcggcgaatcgccgacctgaggcgcatggagcgcgttctcaaatccgtcgttgcccaatgcggcgacggcacgctcccggagtgtccgttgatcgaaacgttgctccaggagcgaactgtcaactgatcgctgggggcgcctatgcagcgccccggacctcgttcctctgagcgtcgctctgttgcgcgtgcatccagtcggcgatctgctgcgccttgctcgccgcagtgaagatggcgcgctggtcggagcgcagcgcctcgagccaggaggcgatgtaccgggcgtggtcgggtctcgcctcgacgctgaggttgagatcggcgcagatcatcgcgctcaacaactcgaccgtgcattcctccatagcgtatgcggccgagccgaagcgtccggaaagatcgcggtcgaggcgatgcttggcgccggaagcgtggccacattcatggagcaatacggcgtagtaggcgaccgcgtcgcggaagcaggcgaactccggcatctgcacatgatcggtagacggacggtaataggcctgcgaaccgccgtggcggatgtcgatgccgagggaagcgcagaaccgttcggcccgctcgatccgctcggcctcgggcagcaccggcatctcgggcggcgtgtagccgtcgacctgggcgcagttgaatacggtgtagccgcgggcgaacagacgccgggcgggctcgtgacgatcctcgtcgccgtgttgggcgtccgccgcgtcacgatcggtcgtcttccagaacacgaccaagtgaccgcgctcgcccttgcgaacctgagcgtcgagcgcctgccattggcggtaggtgccccagatgccggcggcatagccttcagcgtgcgccgcagcccagagcgagaggatgttgacgccgcgataagccttgcttgaggcgacgttgacgggcgtggtgatggccgatccgtcgtgatgccagggcatccggtagtcgctggcgcccgcctcgatggcggcgatgatctggctggtgacccgctcgtagatatcggtcggggtctggggggtgcgatctgtggtcattgctgcctccttaagctcgccctctccgtcgagggcgaggcgccaggggcagacgcgggaggccggcccgtcacaccctgttctcggtgctggtgcggaacagggttgatgggctggcagcgtctgccacacccgagccctgcctcgacgggcgagctaaaggaggcgcagatcatgatcggcgcgcgcggaacagagcggttagatgatgcgcggctctctcagccggcgtcgtctcgccgcgagcacttcaaggcgacaaccctggcgtcaacagatcgggccagctccttccgcagccccttcgatgacggcatcccgctcggcgatcgaagcctgccacggcccgctcagcatcaggagccagactcagtccgaacctcgtctatgttgatcaggaccaccatcattcgctcgaggtcctgctggaggatactgcgctgaagatggacgagtcgattctcgttcaacaggctcctggcttcttgcgctgaacgggcccaggcgggccgatgtcttgcggtgatgcaggcatcaggaccagggtcggctggcaaaacactgtcagcgggcctttggcatcagttgcctgcttcaggcaggcggcagtgccgggatcgaagaagcagccggccagcacccgacatgcaatgttcgctcgaggctcgcgagcattgtgcggagccgggcacggtccgcaatcatcgccggaagcgggccgagttctgccgatatgccgtcaagcgtcttcgcttatgcgcgttgccgcgggtacgggctgcgtcgcgccgacctggcgcaggatcatgccatcctccgtgatggaaagacaatcacctccactcgaggtgagatcttatttggatatagagatattggcctttctgagcgcttcctctatcgattttgctccaagcgcctcaagcgcacgagcaaggctttgttcgacttcagggatacgttttccctgaatcagcgcgatctcggcgacagatctaccttcggacacccatcgaaggcaagatttttcgatgggtgagagcatggtttcccaaatccaaccgccagattatgcactacggaccatcggtctcggaaaccaagagcatcgccggcgaaaggatggcttacaggcggccatatactcctaccgacttcttgatgagggatggcgagcgcagtgaagcccaatgcctcccctatccggcgagaccaccctccgccacttagtccacgtggagttcagttcgagttcggacctcagcagcaggaaagcggcttccgggaggaagccgacctttccatgagaggatcccctctgcctgcgcagggtagtttaaagccatacgcagcgccggctgccacagcgcgcgcgtccgccgccttgagcactgttgatggtcagcgcgccggctctcgccgaaaatgtcgcagcaatcgcgatggctgcggaatgcaaggacgagtgacagtttcatgagcttctcccaagtttgaagatgcacacctcttgcgtgggcccctttgccacttaattacattgcgcaaattaatcttcgttgcaacagattgttcgaaccgtttgtcctaagccggacaagaatgttggtggccggccaggatttcgttagttccggaccgcggcgccgacaaatggtgcggcgtaaggggcgcgccaattcggcacggaacttgctgcgaggatttcgtttaaagcagacggcagcggcagatcttcggtggattagccggccgtgggtgattagcgcttagtatggcgtcatgaacaggcgtgtcacgttgttttcatcggggattgatcatgcgagtagcgctgatttctacgtcaatatttgccttatgttgttcgtcaaatgtcagggcagaggcggtgcttccagtgaacccgtcaccatatctggtcggcgccatcacgagaaacatgtttagagtgccaaaacctgaccaggacttggttctactatctgcgcaccgcggatcttgggaggtatatcccgagaactcagcctacgccttgcaggacgcctggaattcacagattgaggccgtggaggtcgatgcccgctttaccgccgataaggaagtcattctatctcacgattacaggatggagcgcgagtccactggaaccggcttcttgtacgatcagaactactcgcaagtacagcaagccgatctacgcgaccgtcatgggcgcgtgttcaaggactcgcgaggacgcaacgccaagttcatgacgttttccgcggcgcttgatctgctcgcgcagtacgtcacagatgatgggcatggttatgtgatgatcatcgatgtgaaaggggcggttgacgatcaggatcccactgatcccatcgagctcacgcagcgttgccttgatattctcgcggccaaaaagaacccaaagctcagcaaggctgtggtgtttaagctgaaggctaaggatgcggtggatattggtacgtttctgaatcggaccacctacgatcccaacgtcatgggcgggttgatcgtagttgaaaatccggacgatcagaacgttaaggattccaactatgatcctcacgaagatacaatttacgatcagtggaatgtggcgccgttccccgtccagtttgaaatgaaccaattctacaagggtgacggtcttcaggcgtatctcgactatgtcgatcaaaagcagggcttcgccacctatcatgaaagtaattattatccggagggcgtcgccaacagcgcgggaaaatgttgttttgagcataacaccgatcccagatccgtcgctcacggaggtatagtgccggactatcgcggcgaaccggaaatggcgatcgtcaatcgtacgaatctgatcaccactgactggcccgacgtggttgccgacatgctgcgccagttggggcgccgcaacaccagcaaactgagccgctaaggtaagacctaccgcttagagtggaatcttccaatgataactggaaagacaatctctctaccactctctgtaatagcgtgtcttggtgctggcgcaagccaagctgccgcatgcgccaatcagactgactgccttaaaagcgcctcggcaaaagtgtctcagacactcacccccaaggtagtgcctgtttttggcgattatccgaagctgtatatacacgactctgctgcgaatgaggattatacggtgcctgatactacaaagcaggaatttgacttttatacgaataagacttcatttaacctcccgcgtcgctcttcaatcgagacaagagagatcgcctcgatcagcccggccatggggttcactgtccttttggtcgaaaagacccgcgataatacggtttccaatggcggtagcacactctcgctattaagttccaattccaacgacgcttacttgtcattcgctttaggcgccaagcccagctcaagtgggcaaaagtggtcttttgccaaaagcttgcttcaaggcaacaaggcgcaaaccgcatattggcagaagccgtgggatatgaatcttctgggaccaacaggcgacttctccggaaccgagtggatctattacaccttcactccagacggcaaggttcgcatcgaccgtttcgcgccgtacacctattttctggcgtttaccgcttaccagtgggatgaggccgtgcttgacggtggcttcccgcattttcccttcgacaccggtacgccgaccaaccggccgcagtccgtcactttcggatccgtcgggccatggcttattggcgctgctggtgcgcccggacaaaccccgccgacgagcgagccaatagaggcattgcccggctttgagggagcgacaatattctcagcgcccttgtcgatgaaggaagttatagcttaccagaattcgctgaggggaagttattttctcgacgtggacatgcttccctgcaacagcggccagtacctttccggtcgaattagtactccctgcggtacaggtagtcccggcaatccgccaccgaacattaactctgtcgctcagcataggatcagcaccaataccaatcgttaggtcgtggcaagcaaaactttggccttgcctcaacgacgattgaaaagattttcaaggcaaggaggtcgatccgatgaccagcaaactcgggccaggccgcgactccggctttgcccgccggatgcttcgaccaatgctaatcagaagagctcgctgacgagcgccgcggaggtttgctgacgcaccgcgacacgggcctcagggcattggctgcggatggtctcctcaacctgccagagcttcgccatccgctcgaccgtcgctgttgcgaccttcgagccttccgcgacagtgcgcagcgtttcggcggtggcgcgaaagagcaggccgtagacgagcgccttgttctggtaggcgatcgcggcgatggcctccggcagtgtgaagacgacatgaaagtactgtgtgtcgagcaactcggcgcggcgatcctccagccattgcgcacgggcgagcgattggcagcggggacaatgcctgtcacggcagcggttgaaggcgatgcgccggtagcccgcattgatcgcacgcttcgacgtgcccgccgagcgcggcggtggggcacaactcgatcgccgtcatgacgcgacgctgagcggtcgacagcgacgtgtgctgggcacgataggactcgccatagcgacggaatatatccgccacttccggcctcgaacggggcatgggcgcgagttcagaagtactgaggcttggagggcggcggggtgggcgctggacgtggcaaaagctcgaaggggctttccgtagcgcagaccttgttggtggcgatgcgcaggtagtgggcggtggttgcgaggctgcggtgaccgagcagcggctgaatggtgcgcacgtcggcgccggcctccaggagatggacgacgaaggcatgccgcaagctgtgcggtgtcaccggtttcgacaagcgggagagatcgtgtggcttcacgcaggcttgcccaactgcataccgagtaattgggtgaccggcgcgatctccagggaagagccacgcctctggccgccacatcctccaatagtcgcgaaggatctcgaggagcttgggcgacagcatcacatagcggtccttttggcctttaccatgctcgacacgcacaaccattctctggctgtcgatatccgtaggcttcagctgcaccgcttccgaaatgcgcaggccggcggcatagcacgtcgtcaggatggcgtggtgtttgacatcggccacgcagccaagaaagtgctgtacttcatcgggactgaggatgatcggcagcttttgcggtttcttcggaagcggcaatacctcttcaggcgcccagtccctctcgagcgtgacgttgaagaaaaagcgcaacgccgaaagggcgatgtggatcgagccgggcgccaacttcttctcgttggccagatagacctgataggtccgaatatcctcgcggccgagcaagtccggcgccttgccgaagtgtcggggtcatgatgagctcctctgtctgatgggataggctgccaaacagccgtctcatcctctcgcagttggggctcctactgaatacatgacctccttgccgctccgcggtagcggagcgggttagtccaaccctatatatgtgtcggatgagattatgtggcggcgtcgctcgcagttgctgcgtttcccggccgggtgcccgctcggccgccacataatagttccgtctcagatggcctccagcaatcgcagcaaggcatccttcggctggaaccgagccggctggctgccggcaacgcccgccttgtccaagccgcgccgcatcatctcgacgtcggctgccgcgtagcgatgcgtcgtggccacctgcgcgtggcctagccaggcctggatggtcagcaggtccacaccggattgcagaagcgtcatggccagcgtgtgacgcctatgtttctgtcgacataggcgccactatctaccctgccggactatgtcgggtagctttgttcgcaacggtaaatctctgagggataaggatatttcctacagagccgctcagggcacccgacatagtcaacccggttcacaggctgttcaagaaccccaacaaattgtcatcgggtcgaaagcgggatgacttgccggaatatggggaggtctttgccaaggctgcctccttcatcgccaatgtcgcctcgagataaatctgtgtggtctcgacggattcatggccgaggcacaaggcgattacggcccggtctacgcccgcctgcaggaggtccatggccattgtgtgcctcggcctctggcactgggaaacaggatactctggtctccgcgctgcggctcgttcagcgagtttctcaacactgcgattgtagacttggcgaacggagtgcagcgttccccgcgcaggtgggcccccgtgccgaagaacaggcggttggtgtgaggcgaaatcgagcgacgcgcgagttgcgggtaacgttccgcagcggccgagaccgcaagttcaaggcgctgggtgacgtccgaacgtgccatgcgccctccgccccggttcggaaacaggaagttctcctcgcccgcgcagtccaaccggcgtttccagttccggatcaggttggcggtcgtacgccagagcggcacgctgcggtctttgcgccccttgccatgcaggtgcgcgaccgccgagccatcgacgacgacctcgccgacgcgcagaccgatggcttcagacacgcgggcgccggtgttatacatcatgctgaacagcgcgcgtcccgctcacccgcccaggtccgcgcatacggcgcgtcaaagatcgcctgcatcatgatgatctcttgagacgtcgcggcgctccgacgattatccgtgacacgtatccaaggtcgttcacaatccagagaactgccgtcgcggcgccaaaaatcgccgctccaatcgcacttgcaacgacaattctggtcttgccgtcccaaagttctccgaattgtatcaagtccgttaagcgaaagacggcgccctgaactaagtaaagcagcaaagtactttgaccaagctccaccgcaacaaggcgagctaatcgagtcgagcatagaaccctccaacagtgaaacaaagattgcgccgccactgctgcagcggctgcagacccggtgaacatcagcaagacctgtttagccgattgtgcatcatgaactaaaacaagattgttgtaagcgtaagtgtccctcccccaatcaagaaagcacaggcaagccactgcccagcatgagaacatcaaaagagatttgtgacgtagcatggtgttcgcctgctcctcgatcgtctgggcaaacaagaaccccaaacagaagaacggataggtatatctcagcaatggtactatcgataatgtgataggcataagtgcgatcacaattgcagacgcgcacaggatccatttcgataaaaggttgaaagccgcaaagagctttgtgagaaggaaagaagcaagtactgcccacaagaaccaatatgtgccaaccaattcacgtgaaaagtccagaagtccggcagtcacgccgctgaagtgaaaaaacgcggctagcttggctgtttcaataagtgcgcaccaaaacagcattggaatcagtaattgaaccgcacgatcaccgacggcgcgacaaaacgatgttcgcagaattgttccagaagcaagatatccacttatggccataaagaggggcatgtgaaacatatagatcgccttaaaatacggcgacaaccaaaagttatctgtgtttcgatagatcaccaattgtaatagatgacccaatactaccaaaattatgagaatgcctttgacaaaatcaaaggttatatcgcgattgttcgcccctgcggagcacgaaccgcgctccacaggggggactgcggcgtaccccatgaccagctcctaaattttcatccagcgacggttatgcattctcgaatagacgatcgggagacttgggacaggagaaaatcagttgctgctcaacgtccgtctgccaccggcgatgacatctgacttggctccctgcagatccaccagataatcaatcttgtttagattaggccttcggctcaacttagattgcttcttggatggtctactaactgccctcaatgaagtgaccttacaggccggctcttccaatccgctttcttatccgctctttcaaaattggtgcaatcaattgtttggatgaaccgcatttacatgatggattgatatcggactttctaaccgccaacgagtccgccgtgaagacgcgcttggccgcaactgttccggcacaaaagatcgttcaaaatgtaacccggtatgagctcccacgtctccggtgatcagcgggcgcgtgcgtagcggatcggcatccagtattggcgcatggcgtcgacggccgctggaataaaggcgtaggcgttacggagaaagtccccggtctcggagccccttcgtggcggttcgggcagcggacggccccgatcgtcgcgacagtgcagcaggatgggcagaagcaggctgtgattgacgttaccagcgtccagcaacggcgcccacgccggcaacctgagccgcgtcgcggcgtagaatccctgacaccaggggcacggatcaacatcaccatgggtttgcgccggtgcatcggctcgaactggtcgggcgcggtcgtaagacgttgctgatgtcgttatggcgcagcgcgacggcgaagatcgctgcgaactccggggtatcgccgtggttgaaagcatcggcatcgatggcgagcagcgggcagatccagtcgagcggactcatcgacaccggtccggccacgatcgcggcaacgtagccgtcgagcatggcgagactggtggcgataggctgccgatcaacgcgagcctgcagccatcgctcgagttcctcaagcggcatcgcggcggccgccatcgacgacgatgctgatgaatggcgatgtcggcttatgcggcggtctgtgcgatgcgctcgcgggccgccttccagttccaggcgagcagctcgtgcagctgatggtcgtcctggtcatctccgacgaaatctatgaacatggcgagaggattggcgaagatccccgaactccaattcacccctccggacggtgccttctacgccttcatcggcgttggcaatctcattggtcgcaagaccccggacggaaccgttctcgctgatgatacagctatcgcagcctatctcctcaacgaattcggtctgtccagcgttccgggtgctgccttcggctcgccttcgttcatccgcctgtcgattgccgcttcggacgcggaactcgaaagcgcgtgtgaacgtctcgccaagctggttgcgtcgcttagcaaatagcactcgaggactaaggattgcatccgatgaacagatacgaagttgcccttgtcacaggggcctcgagcggtattgggaaggcaatcgcgcttgagcttgcctcggccgggctcagggtccttgctcttggcagggaccgtgctgcgcttgacgagcttcactcgaccgcgggcatcgtgcccgtcgtgttcgatctctctgacgtttccgaagtctatgggaaaatcgcgggggaaaagatcgacgtgctggtgaacaacgccggattactcaccgcctcggcaagcctcgtcgacctgtctgaagacgatattgacgcaatgatcgacatcaacattcggtcggtcttcaagctgacgcggcatgtcctgaagcagatgatcgaacgtcgccgcggccatatctttttcaccggttcaagcggcggccttgcccctcatcccaactcttccgtttacggcgcgacgaaggcggccgtcagcctgttttcatctgcactgcgctgcgatctgatcggtctaccgatcagggtgacggagctttttcccggccgcgttgagacgaacctctatcggacagcgctcggcaaagagggcgcaaagaagaagctctacgacgacaatgaggcgatccagcccgaacacatggcgcgactgctgcgtacggcgctggagttgccggacttcgtcgacgtaacccgcctggaagtgatgccgacgggccaagtagtcggcggcgcccagatgtccaaactttctcgttaactgcgaaccttggaaggaaaagatcatgcagggtatgaacatcgccgtcgtcggtggtgcgagcggcttcggcctcgaaacggcaaagctcatggtccgtgacggcgtgtcgaagatcgtcgtcatcgacatcaatcaggagcgtcttgatgcagcgaagggagagctggccggaaaaggcaccgagattttcacggtcgtccgcgacatcgcacgggcagaaggcgcgcacgcttccttcgacgctgcggtcaagaccgcagggcgcatccgctcgtcaatttgcgcagcgatctatccgcgcgcaccgctgctcgaaatcaccgacgatatgtgggacgctgaaaatgctatcaacatcaagggcacctatcacatgatggtggcggcggtgaagcacatgcagggccacaaggccgagggcgaagtttccggacgcatcgtcaacattacctctgtcgacgctttcaaggcgcacccgcagaacgcacactacgccgcgaccaaggccgcggtcgtcagcttgacccggtcctttgcgcatgcgttcgccaaggatcaggttctgatcaactccgtcgcgccggcgggcatggcgaccgaaaaagccaaatctcttggcttcctcggcgagcttgccgcggccaatccgttgggccgggctgccgaaccagcagaaattgcagaattcgtagtgatggtcgcgggcccgaagaatacatacatgaccggtgaacaagtgatcgtcttgggtggttacatctacgcctgatggcgttcgggtcgcgcctggccttctggcgcgaccccataggaatctagatagcaagaaagtgaaggcggagacgatgggaaacggcttacaggagcgaagcgggggcctgatccttgtccacgccctcaggatccacggtgtggaacgcgtcttcggcgtgcccggcgagggctacctggcggcgcttgacgccttccacgatgccgagcgtgcgatcgagttcgtcatttgccggcaggagggcggggcggcctatggcaaactcaccggcaagccaggcatctgcttcgtcacccgtgggcccggcgccaccaatgcttccgttggtgtgcataccgccttccaggattcaacgccgatgctcctcttcatcagccaggtggcgcgtgaacagacggagcgcgaggcctttcaggagatcgactatcgccggatgttcggccagatggcaaaatgggtagtggagatcgaggatgctgctcgcaccccggaactcgtcagccaggcgttccatcgcgcccgccaatggccggccgggacccgtcgtcatcgcgctgccggaggacatgttgacgaatcgcgtgacggtcgccgatacacccgcttacaagcgcgtcgagacctatgccggtcagccgcaactcgatgagctgaccgaactgctagcgaaagccaagcatccgttggtcgtcgccggtggtggcggctggacgcagcaggctgtcgccgacctgcgttccttctcggaaggtttctcactgccggttgctgcctcgttccgctgtcaggactatttcaacaatatacatgctaattatgccggtgacctcggcattgcggccgggccgaaactgattcgacacatgaaggactgcgacctgctgatcgcaattggcgcccgtctcggcgaaatgacgaccggcgcctattcgctcattgatatcccggtgcggaagcagaccctggtccatattcacccgggcgcagaagagttgggccgcgtttatcacgcgaccctgccgatcaatgccagcgccgtgggcttcctgtcgcaggcgaccgggctcgaaccggctgttgcgccagtctggggtgattggacgaaggctgccgatgccgactatctgaagaaaccgcaggtgcccggccccgtccaaatgggcgaggtgatggcatggctgcgtgctcatctgcctgacgatgccattctgaccatgggagccgggaattacactgcctgggcgcatcgcttctaccagtaccgcacgttccgcacccagctcggccctaccaacggctccatgggctacggcgtgccggccgcgattgcggccaaaattaccgcgccggcgaggacggtcgtggcctttgccggcgacggctgcttcctaatgaacggacaggagctggcgacggccatgcaatacgacgttcgcgtcatcttcctcgtcatcaataatggcatgtacggcacaatccgcatgcaccaggagcggagctatcggggccgcgtttgcggaacgcggcccgcaatcccgacttcgccgatcttgcccgctcctacgggttgcacagcgagactgtgaaggcgaccgaagatttcgtcgacgcctttcgccgctcggaagcctcgggcaagccggcgctaatcgagatccgcatcgatccggaagcgctgacgcccaaccctgacgcagatccgtgaataggcaatcgcgtcggggagatatcagcaagggcggcggcgttactcctccacttcgtctagcattgcgcgaaagcgatccaggatgcgctaccagcgcccgctccgaacgctggtagcgttcgaacagctcagtggagaaatgcccggagcgatcctgcggcaaccgcagttccagtttgccgacccgcgtcatcagcgtccgaccgtagtagccggagcggtagccgagccgctctggcgtgcgctcgcctttccccgcccccagggcctcgtccatctccgcttcgagcacctcctgcatgaccgcgcggactacctcgcgcagcccatccgggttcgaaagcagaatgtctttgaccggagtgctggcggtcttaccttcaatcttggtcatggtagcgttcctcgtgagtgaatcaggtgacttcgacatcaccagcctgccatgaccgcccctcgcagagaatttgcagaaccttcggcacactaccgcggtgttcgtacccgtgactacagtgttccgcgcaatgaacctatcgttgctccgaacgaaacagtgcgaatcgccgtgctgaaggatcggttagctgacccttcatttccccccgagcctttttgattattctttcaggagagcgtaccgaagcacgcgaaggtcttcgtcttcgagtgagatctccaggacccgattgacgagattgtcgtcattgtcgagttcgatcaacgcctgctcaaacagctcgatctgcatgtcgaggtccatgccgggtggccgttaaggcagatcagcccggcatggatggcgacgtcggcatattgccccttggtgcccggcttgtcttttggtccccggaaatcgaccgaattcttcgtgacaaacgtccagtcgccctcaaggatgattggtttaagctcccagtccttcaggccgcccagtttcatccagacgacatggcttgtttcgccgtggcctttttcgatagccatttttgccagttcaggactgagacactcatcgatgagaaacttcatcccgtcttcctgcgacgggcgacgcgacgatctgagacgatgaccgagccttcgggaaggtcgccgaagacgcggcgccggccgcgcaaggggttcgcttccgcgtagattgaggcaagccttatcttttccgcgtccaggctaggccaggcctccagcatgcgctccaccgaatgaccggcagctacggatgcggcaacatcatagaccggaacgcgggtgccccggacgacaggcgtaccgccaaggatgtcgggcgaggatgtgacgatctctcgtgctgcggcaaggtcgtccagtcgttcgctcgcacctctcataaagggcataagatcgatcgtcagaaactcgtggtgcacggtccagtcctcgcgcaacagggcggaccaagggagcgtacgcgctcttgccagtcgaccctctgctatccggatggcaaacagccgctcttccgaggtgagacggcgggcgctctcgaaatagaaggcgatgagggagcaggccccggccaggacatggcgaccgttgtcaagcgacacgaaggcttctggcagaatatgctcatcgatgacgcgattgacgtcgcgtaggctcacgcgcgagacgacggcagcctcgctcgccttcagcatttccgcaactgcgggcatgtgggcctccatataatgctccgatccgtcggaatatataatgtgcaggtggtcatatcaaggtcttgaagacgaatgggtaggcatcgcctgatggtggggcgcgtgcgacactcgatcgaccggcgggaagaggggtcgttttcaccgcccctgatccccgcgccgcaatccaaatggcaatggtgcttgctgttaaatattttgacggggtttcttcaggcagccttcattgtttccgatgcgctgccgctgttctcaccaagatcgaaccggtcgacgagttgcatcaggtagtccgcctcgcccgacagcgtccagctcgcggcttgcgtctcctcggccatggccgcgttgctttgcgtcagctgatcaagccgcgtgattgcaacgttcacctcggcgatcgacgaagcctgctcccggctcgacagcgcgattgcttcgatctgggtcgagatctcgaggatgtgcttggagatatccagcaacgcagcaccggtttcggagacgaggccggcgcccttggcgacttcggccgtggagtttccgattaacgcggcaatctcccgagcagccccggcggaccgctgcgcgagttcccgcacctcctgcgcgaccacggcaaaacctttgccggcctcgccggcgcgcgccgcctcgatgcccgcgttgagcgccagcagattgatctggaatgcgatgtcgtcgatgacctcgatgatgtggccgatatggctggaggcggcctcaatccgccccatggccgcagtcgcattgcccacgaccacggtggagcgatcggcgtcttgcttggccttggagaccgtattgtcggcattggccgcctggtcgcctgccctgcggatggtggcgacgatctcatcaacgcttgcggctgtttcttcgagcgacgcggcctgctgctcggtgcgaccggagagcgccttggcgccctcggccatctgacggccgcttccctggatgacggacgacgtcgtgcggatgtcgaggagggtttgcctgaggcccgcgacggcggcgttgaaatcggtgcgcagtttgtcaagcgccggggcgaagggtgtctcgatcgttgaggtcagccggccctttgccatggcgtcgagcccatctgccagtgcgtcgactgcgaaggcgatttcctggtcgcggcgcaacttttccgcctcgtttcgctcacgctcggcatgggcggcgacgcgctcctgctcggaccgctgttcgagcgcgatcctcgccttcgcattggtcttgaagacgtcgagggcacgcgccatctcgccgatctcgtcggcgcggttccggttagcgacagccgtgtcgagcaggccaccggccagattgcgcatcgtctgggtgatctccccgatcggccccttcagcgtgagcaccagcgccgcgccggaaacgagagcgatgatcacgcccagaaccatggcgccgatggacagcctattggcatcctggctctggcgcccggcggcgctccgttgcaggtcggcgaacagcgatatctgctcgccgatatggtcgatctcgtcggcagcggcctggaattgctgtgtgcgcttgccggtggcgccgacaagttcgacggcggactgttcaatccggtcgaaggaggttgcgagcttggtcgactgctccccggcgaagccgagatcgcccgccgtggagctcagcgcaaagagcgcgttgcggcattgcgcgaggtgcattgccaatgtcgactgcttttctgcggaacggtcgagcatgaattcggcaagtgcgatgcgcgtcaggtagatggcatcggtgagatgccgcgtgtcctgcattacgagcccggccttggcaaccgaggcatcgagctcctcgaaagtcgtcgacacatgctgcatcttcgcggtcgccgccgcctccaacggctccttaagcgctttgagctcagcgaagacatccaggattttctctatgttttccggcgggcgcgccttgtcatccaccagcgcactcaaggccctgacgttggccgaaaaggccttgcccagcggcttggatttcttcggcaacgcgatcggtagcagcttctggtgaatcttcaggtcgcccatggctgcggcgatcgcccgatagccctcgccatcgtccttgcgcgcggcaaatgcatctctgagcgcaacgacaaagcttgtcgcagagaggatcctttgcgcgtcacgcagtttctccttggcgtcgtcttcctgcgtggagatcgacttgtcgaacgcggtggcggcggtcaagagatccgcctgcgatgtcgagatgacccccaaggcctccttgatgccggcttcgaggcgggcttcatcggcatgcagagcccaaaggtcgtccattcggccgttgatcgcagaaagcgccgcggatgcgctttcgagctccgcccagccttcggccttcggcgtcaggcgtgcgccggcagcgtcgagcgcggcgcgctgctcgtcgagcttgctgaagacgagcgcccggttttcttcggtcgtctggtcgagaaagccgatcattgccgcatagacatccttgaagccgcgcagcgatgccgcgacgtcgttggatatcgccatgcggctttgcagaagcccggatgcgagcatgccagtcaccccgaccgcgctgatgctcaggatgaagggcaacaccagcagcatcaccttcgttcggattttgaaacgcgagaggaggcgatcgacccagcccatgagatgtcccgaaattttgttgaggtggcagccgcgtgcagcgcagcatcacggcatcgataggcggcgagggataacaaatcgataatgaagcggcgatcacatgcaaatgtcacaaaacattcacacaagctaatttgtattacttttcaatcgactgggggatactgcaaaccgcgagcaatcctttccgctattgttggaacaccagtcggttcgtcacgtcgctgttgtttccgtgctgtagtttttcgccacagttgaagaggggctaccaatggaaatctccaaatttgcggacgaacaactggccgatcagatcgccgcaggccgcgaggctgtgcccgaagttgatcccatacggttgattgagcaggtcgtccatcgggcgcgcgctggggccggggtggatttcgacgtctttgagtccctgatcggcgaaatcgatctcgtcgaaatcaactatctcgagcgtggtttgatggcatcaagggcggtgtgcaggatcaatgttccggcacccgttggcgacagtagcgactgggggacagggttcttgatcgggccgcggctcttgttgaccaacaatcacgtcatcgactccgctgaagacgctctcaaggctacggtcgaattcggctacgaactcgacgccgaagggcggctgaaacgcacgacacgctttcggctttccccgcaagatggttttgtaacgagcccgagggatgcgctcgattacacggtcgttgcgatcgaggaaaacagcgaggatggcgcgacgccaatctccgacttcggtttcttgcgtctcgacgcgcgcaccggaaagacggaggtcggccagtatgcgaccatcattcaacatcccgatgccaagacgaagcgcatctcgctcagagaaaacaagttcgtcaaatatggggacgaggcggacccggagcgcgacaatttcctctggtactcttccgatacggcaaatggttcgtctggcgcagccgtcttcacggatgcctggcaggtcgtttgcctgcatcacgcaggcgttccagaccgaaggatgatcgatggcaaggaacactgggtgctgaccgacaagacaacggcgcccgctcgcatcgccatcaatctgcccgtcgacaaagttcactggctcgcgaatgaaggcgttcgcatttccaagctcatcgccgacgttcaagagagaattgcggcgccaggctttgcccgttccaccctggtcgatgaccttgttgccgatgcgaccggggtgaaagcctttgccggcacgacgccaggcgagagcatcgtcggcccgccgctcgtcgccgcaccggccctcaggcttgttgccgccgaggcacgacgccggccgacgcggcatacgcacccggccaattatttcgacggacgcgaaggatatcgatcggatttcctgcccgtcgaaatcccgctgcccacactcggggtcaatgcattgcggcatggttcgccggccaaggtcaccggtgcagccgacgacgtcctgcgctaccagcatttctccgtggtcctgaatgccaatcccaagcgcaagatggccttctacaccgccgtgaacatcgacggtgcccgctggacgaacctggaacggggaaatgacgtgtggttttacgacccgcgcatccccgaggaactgcaaaacggcgacgaactctatggcgacgagcctgtgccatcgaagaactatttcgatcgcggtcacctcgtgcgccgcctcgatccggtttggggcgagatccgcgttgccaagcaggccaatgacgacacgttccagtggaccaattgctcgccgcaatattggggcttcaatcagggcgccgatctctggcagggtctggaaaatttcctgctctacaacaccgacgacgagaatgttcaggcttcggtcttctccgggccgctgtttcgcgcggacgatgaagagcacaggggaattctgatcccgcagtttttctggaaggtcattgcggtaaccgacaagaacgacaggctctataccagcggctacatggtcagtcagcaggactatgccctcgacattccgttcgaacgactcccggtcgggccgaacagcacaaaacctggtcaaaatttccaggtcccggtggcaaagattatcgaagacaccggtattgtctttgcagacgagatcttgagcgccgacgcctattccggaccgtcaaccgggcgagcattgcgcaccgtggcggacatacagcatccccggcgctgatcatgcaaagcggctctttgccgcgggctgcatccaaggtttgcgggcgcatcgtgaagccaaacgtcgccagttgcaccgccggcccgttgatcgccgttgaggatctgtcgccctggacatcacgcggcctttgcaaatctggcacgttcgggagggacattcggtttctcgtctgattgcccccgttcacgtctacggttgcgtgtcatagaacagtcataaacggaagcaagcatgctgcgattgccagccttgccgcggggctatgaggtgaagggggacgatcgcttgccatcaagccgcttgcccgaccggaggccgtcgccgtcttgccgcgcaccatcgagcaagctatgagctattccgtcgacgtcgacgtcgacgtcgacgtcgatccggacgggcggtacacattcaatattctggatgagacgcacaggtatccggcatgacgctctgctggaaagatctatacaaacctgctcacggcaactgggtgtgcactgaacggtggcgttgcgaacgggcgaaccgtcatttgaacgaataatcgtcgagccagcggatccccttagacccttaaactatttgttcgttgactcttcgagcgccgcttattcggaagccgagttttttgaaccttaaggcccgcggagcggccgaggtttgcagcggaggactcgcgcaaagatcaaaatccgcaatccaatacggtcaacgatccattcttgacgggtttgccgctcttgaggcggatacatcacccgcgaaagcggcagcctgatcatcggctgccgtctcattaaggagctcggcaagaagcaccggacgcttgtcgcaaacgctcggtcgggcacggatcgaactgcgcacgcacatccgcagcgccgccttccagggctatgtcgtcgtctttcgctacgttgatgagggcatttcgaggacaatttcctcgaggggcacagggatgccggcacggtgttttcccaagagcggcctgtctttggaagatatccgcgacgctctcatcgatgcggccgactgggatttcgtggtcagtcaggcccgttgaactcaacgcattttccgctgacaagtccggtactcaaggcggcgggacagaccggcaagggggtctgtcggctcgccgcatggagtcaatcgcataaatatattcccccaaataatccataaaaactatattttctgtattatactcctgtggcttcctaatgtctatcccgtgaatgcaagcgagaccatccgatgaccaaaacgatacgcttcaacgcttttgaaatgaactgcgtcggccatcagtcgccggggctctggcgccatccgcgcgacaggtcgtggcagtacaaggacctggagtatcggacggatctggcaaaggtgctcgagacgggcttcttcgattccatctttatcgcggacgtgaccgcctattacgacgtctacaagggcaatctcgacaatgccctgctgcagggcgtgcagataccggtcaacgatccgcttcagctcgtcaacccgattgcgcttgcgacgaaccatctcggcatcggcgtcacggcgtcgaccagcttcgagcatccctacaccttcgcgcgccggctttcgacggccgatcaccacaccaaggggcgtatcggctggaatatcgtcacgtcctatcttgaaagcggtgcgaagaacgtcgggcagggcggattgcgttcccatgacaaccgctacgatgtggcatcggatatctcgaagtgctctacaagctcttcgaaggaagttgggaagagggggcggtcgttcgcgacaaggagcgcgggatcttcgccgacccgaccaagattcacgaggtcggtcacaagggaaaatatttcgtgtaggaaagggtgtcaggtcactgatgtggtaattggttccgccggggtattccctgtcgcgactgggcgtgatccggcacggcgcatctcgatgacaagtctgagggtcaaatagacggacactgcggtaaggatgacagcgagaaccggctcaaccaggggatcataggtagggccccaatttgcaagccgatatgtgtcgtcccagggaccggcattgaccggtcttgaccagatatctgcgcagttcacgagcgcgttggatacgtgttggcagacctgcattccgacaacgatgcgccacaagtggattgcagtgagaaggggcaagcagattaagacaacgaacgcgatgccttggacccattttcccggacggcttctgggctcgatatcaaggagcctaaacggaaaggcctccgatgcagaaccggatgacctcttggcgtgatataccgcgagaaaaggaaccagccagaagaagagcgcgaagaagcgcattccatgaacagcataggcttcgcgtgtcaattcgccgtcaaacttaagctcaatcggcagtttgataatcaacgcgaaatcagatttttgcgtcgatccatggatgttgatcatcacgactagcgtgaggatcgccagcgttatccatagctttctgagcgtttcctgcgtcattccggcccctgacacgttaagccttgccgcagatgcggttcagttgttcctgggcccaaccgcgcagcaccggttgcaggagcccaagccctgacaggtattcgcctacgtcacctgaaacgtcgaggtccaaagaggtaatgcgacacgctccaacatcgacagtgacgtctggtgtgacagcacccttcactgaaaaccgaataaatgctgcgtcgcttgtcgcgcaggtgacctccacctttgatctaactcgaaacccttcaggtgctgagcaaatatcgatctgagttgcctcaaatcgccgtgtacggtttggaccctcaggcagagcctcgcaaaccttgatctgctcgatagccgccttgatttttgaccagtcaggtgtgttgagaagtgaccaacattcttccgcttgaaccgttgaggttcctatcaccaggatgagcattccgaataaggcgggcttcaccattggcacgatccccaagccgcacatagaagctgcgttaacacaacatgacgtcggataattttcaactagctgttgaaagattatctcatagcgggtgcactttgtttgaggtttcgaacccggccttatgtgggtccgatgcttggatactaacgtccgaagccaaagacgatttcctcgtcgttttcacgcgctgccacaggagaagacttacgagccgctggatcagctcctaagatcgtcagtgacgggtaacccttccaatccagttcgagttgggcgtcaaaacccctcttctgggccttcgcgaccagattcttaggggcgcttgggtcgtatcccatggtcacgtcagcgagcggatggcgtagatattgaacgctttgcaacgcgagcgtcattgccgcaacaataacagtacggtccgcaaacaagcttccgtcgcgatcgtttgccaaacggaacggaccattctttatcggcgtgtgccctggaacggtgaaatatgcatagcgagaaacgccacggagaaattcgcccgtcgtctggtcgtcgtttccggcgaacgtgggatcgctgccgaccagtatgatatcgatgccgccgtcgccctcatcggacctggaaacatatgcgccttcgatgaacaagcccgattggttatcgacctgcaggcctggctgttcaccgaacatgatgaaagcctgtttcgctggaagcttgatgtcctgagcctccgttttcccgcaagtccagttccatcagatcggcaccaatccttgaaacgtcgaaaatgcaatcatctgacgctaggacatgagctgcaataggctctaggtgtgcaatggtcagcaggcgttcgtcgcgctcttccggcgacataccgctgaactctttcgaaacggcccagtggcgcatgatcgtttcctggcggaatgtgttccgaagctccgatgttgccagagagcccgatatcgtcatgcccaatgcatcgagcctgcggcggaagaccgcctcgaacatggtcgcgcggcacggatgaggatatcgcattgtttttgatcccggatgcattcacacccagcctgatcaaaatctctgcaagcaagaagctcggttcggtgtgggcagtttataacaggaatgaagcccaggcatttgaaatgatgtccccagcaatcttgccaccttcgtcaatttgcagatcgagacctgtcactgtgaagccagtatcctcggcccattcgacgatggcgtttttgcaacctcgaaatcggggacagagtttcgttttgaaagttcgggggaaatcacctacatagccccaaaaacctcagccctaccgctaggctgaagcctgtctcctacgaacggcgatgatgaacccgaagaatttgatcgcggtaggtgatgtgcacggaatggcacaaaccttagaactccttctcaatgaagctgaccgtcacgaaagtgggatgcaccgaagagccggagaatggggaccaaagttcattgttggctcaaggtctccgcgcccctttgtccagccaccgagcaaggcgcattgcccagcgttcgattacccgccgcgcaaggcctcctgccaggttcggatgatgggctgcgtggcagccgtcgcaaagagtgacaagatttgagggttcatcggtcccgcccatagaccgaggcaatagatgatgcacatcggccttcggcggacgtcaccttagtcgagcacgacacgcatctaaagtcatcacgcaggacaacgcggcgcgtttgcttccagttatctgccgggggctgtttggcggctttcttcattgggcgaagaatgggggaaagtcgctgagaaagcgtaaccaatagcaccagtcacagctcattcgaactgaccgcgagacagcgaaattaaaatccccggaggccagcatactttcggcatcgtgatccccggcatcgattgccagaaacttattaatgattgacgcctttgaaatgattacaacagcgctttcaacagctgcactttccgacgtcatcgcggtatcgccggtgtagtagtacagctgaaatacacgcttcttgaagtcgtaatatgttgatatttgagcagaatacagcatcattctgcggctgatttccagatcactatggcttgtttgctgcccacatgatcgctgatgtggtcgaccacgccaaggtcatgggaaatgaacagataagagatgcccatccgcgcctgcaattcccacagaagatccaaaatctgtgcctggatcggcggcgatctgtgaccagtcgatcgaccgcgacgcgaagtgtccgccagaaacggcgcctgtttcagcacgcggaagtgctgcatcttcgcggcgtattcgggggtacaactggccagcttcggcagaggcgtctcctccaatcgcaggaatcgttggttgcgacaaccaacctgcaccggaaccgcgtgcttcggttatgggtatgtcaatccggttcaagaaccgcaccccagcaaaatcaaagacttaaatgcgcaggttcaaatcgcaaaagcttaccccgcaaccaacatggctgagaaaaccgtttgttgaatgggtccggaactgccgccacagttccggaccacggcaacatcgcttcagtgcgatgtgcccgaaccgcccacaggtggcgattcagctcagattagaagtcgcgctgcaggcggacgaagccgctgacgaaatcctccgtgtctgcgccgatgtcgcgacttgtgtactgcacggaaacacgtgacgccaacccagaggtgatcttgtagtcaaccgccagaccaccgcgccattgatccgcatcgctgacgaagccgtaatcaccccaataatgaagccccggggtgatcgcgagcttttcggtggcgttgtagcgatacgaggtggcgacggtccactcggaagcggcgaaatagacgttcgggtcggatgcccagacgccggcaatctggaagacgcccgggccgagttcggccgaaaccagcgcgcggatggctccttcctcgacctcggtatcgtaaccgccgagaaggtcgatcgagacgccgccgaccgtggccgaaacgatgccctgcacgccgatgccgtttgccttcgtggtcgccccttcgagctcattgatggcaacgcctgcctggaacgcgccgccctcatagaggtaggcaatcgagttgaactcggtgatgttcgccagcgagtcagtttcgccgttcaggcctttatcccaccagctgtagaagaaacccgccttgaaaccgccgagctggatataggcctcgtcgaggttgatcaggctgtcaccgacgtcgctgtcgttgtcagcgttgaactcgctggcgaagaagccagtgagcgttccaagttcggtgtcgctctttgcgctgaaggcgatgtatgcgcgcgagaaggcgtcccagtcggacgtgccctgggccccccagccttggcgtttgttgacctcatccgggccaaacgagacctggaaacgagcgtaaccattgatcttcaggcacgtttctgtgccggggatatagaaatagccgatgccgaaagcgtcgcagacgcgaacgtagtccatcggttccggctccgcagcgacgatcgcgtcagccgcttgtgcaccagagactgctgcaagggcaacgctggagccgagaagcacagtgctaaaattcattctcatgcggtcgatctctcttttgggttgggcaagggccggggcaggtcggtcctgaacttcaacggcaccctcgctcgcgctgcggcgaaacgggccgtcaatattgacgggcagcgcgctacctttaccaacgaatatattcatattctaaaggtatatgaattccgtaaggcgacgaaatgaaagtggtagacattcgttgttaacgcaacacgtaaatattgtcgcattttgtacagcgcaaaagactgggcaatgttactaatcatacaaatagtttgtatgatggcgccgaattggcgcgtaataaaacttgaaacaacttgacatataagaaactgatgatagatatatatcgcccgatgagaagagggctcttcccgactagcgccgccagagcctccagcctggcggcgcatttcatctcgacgctatgggcgttttcccaggcgctctataccggtggcgacacggctttcatggccgtcggactttgcctcgcaggataatggggaaggatcgcccgcctacagcgccgtgcgtccttcaggacgcacaaaggcgctgtaagtcttcgaatctacccattgtgctttccgaaaatcggttccgattttcgggccgatgcgctagggcaaaccgtcgagtgcggtccaggaatgtcgggacgctgtccgtttttagtggcagagcgctccccggggccaagcgctgcttgggtctgtcgcccttggactaggcctgctcgacggagccctcgttacgggtgaaacgaagggcggacgaggggctgagaccgtaggcgctcttatagagaaccgagaaccggcccggattggaaaactgaagattcaaggccagctcggtaatgctgcccgcccggccggccttgatggcgccatgggcggcggcgagcctatagttgcagaggacgctcatgggcgagcctcctcgataggtgcggaacatcctctggagcgcccgcggcgtgcaccgggcagcggcggcgaggtcctcgatcgtaacagggttggtcaggttctcgcgcatgaacgcctcagctttaaggagctgtcttggtgccgcaccgctggttccctgacagaatgcctcagcgagattgtgcggcatcgtcgagaacaactttacgagggccagctgcttgtacgcctttgccaacaaaggcatggctttcgatgctgccgagttgagatccctttccgcctgccggagcgtctgatacagaccttgaacgtcatcttgagaaaagcaggtagccggcaatacgaactcgtgcacatagggtctaccggtcaggtcctcgaagcttcgcctgagagccgactcgggaatatggaaggccaaccacgaactttcagattggatcgtcattcggttgccggcacgttcgcgggcgctcgcgacatgattaggcgagatgcttagtgttttgcgtgtccgccggtcggtgatttcgatatgtccggacagcacgaaatagaagctgatgagccgcgtatcgcgcctggcaagcgcttgcagacagaccgaatgctccgcgcttgccagccaggctgacagaactcgttgccggtggtaggcgagcgagcaagcctccggggtctctgaggagaccttccacctccagttcggctcgacagatccaagattggcgaggatcgtgtcgcgcgtatgggcgacgaaactgtctgtccgcagtggctcgtctgtgctgggaagggttgcgcaaaaaagcacggtgttccagccgaggctcggaaacttgtctaggagaggcagcgaaccgcattgacgaaccaatggttccgccgccgcgatcaggttccagtcgagcatcgaaaacagcgccaatgggttgagaggcgggtagagcagaacggctatcaaagcagcaatcgtcccagcgacgagcaggcacaggaccagcttgccgaacggcaagggcatcacttggtggctcgttttatcagcagagccatgacgcgcgtcaatctgcactgctctccatcctgtgcgatattcgatctgaacccggatcgaagatgtgtttttcggatagggatcgcgcgtcggctttggccgttactctgagatgctgcggagcggcaatgatggcgactttcccatctgcctcgaagagaatggacgaaggcgcaccggctgcgcgacacaagacatgtccggccgcacaatcccaaagatgggtgccgtgctcgacatagccggcaagccgacccgccgcgaccatcgcaagtgctgcggcacagcttccaaggcagacgatatgataaccgcgcgcctcaaacgcggcctcgacttcgaggcgatgggcgaggggccatgttcggttgcggcctatgccaaaggcgatcggctgcgccccgacaagcggcgaaaccgagcctgtcccatgcaatgggccatccacagaagcccacaacagagtatcgagtgccggtagcgcaacagcgccgaggaccggctccttgttgcggacaaaagcgatagagaccgcccagagcggtatgcccgacaggaaattcgcggtcccatcgatcggatcgatcaaccaatggtcaacttcggcatcgccaagctgttcctcgccgacgatcgcgtcggcggggaactgggcgtggatcagcctgcgggcaagactttcggcgtcacgatcggctgcgctgacgtagtcggcctcacccttggtctcgatgacgatgtgggaaagattgccaaaccgggccagcgcgaaggctccaaccttgctggtgatgttccgaagcaaatcgagccgagtgtcgaggtcgcttgtcaatttgccgcccgatcccgcgccgacgcaaccatctcttcaagccgcagagcgatagcgtgtgcccgctgatagtaggacgactccgacagcacgtagcggtccatcggcgtctcgaagttcaagggcgtcctgtaatttgttgccgcaatggcttttgtgatcgcatcccagtcaagcctgccgtcgaatggcagcagatggtcgtcctttgcgccgaagttgtcatgaatatgcgtggcgatcagccgatcgccatggcgctccagcaccgacagcttgccgggctcgatcagttcccaatggccgctgtcgtagcagacgccaacgaagtcggaactgtagcggctaaagaggcgggcatagagcttgaggtaattttccgcatttgccttgaccagggtttcgaccgcgatctgcacgttgcgttcgatgcaatgggcctcgacgtcgtcgaaggatcggaacaggggctcgaacaacaggttctcgttttcaacgctgcggaacgtgtcgtcggtgatgtcgacgtggagcacgacattcggagcgccgagggccgcagcgagatcgatacggttttttagaagctccaccccgctttgacgctgccaatcgtggtgagagaggaagttcttgcgtgtctcctgcgcgaatgggacaggtccggcatgggcgagctcgctcaccgggttgacgccgttgctggcatgaacggagtgtgtttgcaggcccgcctccgcaacgatgcggcgggtgaactcgatttcggcgtcggcaagcatataggagctgccggaatcggggttccagttgatatgcgtaaatccggcttcacggatcaggtcgagggagtggcggatgccctcgtcgtaccagcgttcatgggtgggccaatgccagacggtgatgcaagtatccatttcagtgtccattcagaggttgctcgattccggggtgcggccgaggctcaggcgctcggcgatgaggatgacggccagcgagaaggccatgatcagggtcacgtagacgagactgacggcggcctggtcgggatcggccgaaactgcgccatcgacgatggcgatcggcagaggcttgttgttgacgttgtaaaggaaggccgagagcgggtattccgccagcagattgttgaacttcatgccggcgaccaggattgcggtcggcgccacgagcggcaggacaacacggcggagccgatacggccccgaggcgcccattgcccgggccgcttcgtcgaaggccggatcgatcccgatgaaggccgagcgcatgaagcggaccatgagcggcaggctgaagatgacgtagccgatcggcaaaagccaatagctgccgagcagaacgagattgccgacgagcggattgggcgcatcgaaagcaacgatcagccctacggcaagcagcatggtggggatgatccaaggcaggacaaagcagatatccaggcctcgcgtcagccagttgcgcttgcgcaccatgatcggcacggcaaacaaagtgatggcgaggccgacggcaaccgcgatcgagctcatcaacatcgaattgaagaaggggacaaaggccgcgccgccgcccagcacccgagcgtagtttgccagcgtgaagctggaaggcaggacgtcgatgccgatgctcgaagccggggcgaaggagaacagcacaatgagcgcgaccggcatcaggtagatcgctgccagcaaataggccagcgcggtcaccacgatacgggcaagcggattgcgtatcgcccgcaactggatgcgtgttgtcgccttagcgccggccgtataggcgcccttggcctcgaaatactgcgacagcaggatcagccccatgagcacaagccccatcaacagcgccagcagcgccgccatgtctggccggcgcaagctgttcagcgtcaggaccatctggctcagcatgtggaagtcccggccgccgagcacctggggcgcggcaaaggaacccatcgccgtaatcagcgtgagcagcgtaaccgcgagcacggttggcaggatgaccggcaggacgacgcaccgcagaatcgtcatttccgaggctcccatgctacgggccgcctcgatcgtcgaatagtcgacgcggcgcatggcggcgcgcagaaacaggaagtgaaagctggtcatcagaaaagtgtgggcgaagagaaccccaaaccagccgatgaaccaatcgcgcggcagcgacgggaagagcgcggccaaagcagcagtgatggcaccgctcggaccataggtgaagttgtagccggcagccgcaacgacgccgccgaagacgagcggcgtggagaaggcgattttcagaaagccacgccccggcacgcgaaaatactcgagcaccgccacctggaacataccgacgatcgtgacggtgagggtggtcgccgccgtcatccaaaccgtgttccaaagcgctgcgcggacgcggcgagagcgtgcgagttccgataccgcatcaaacatggccaaactgccgagcctgaacaacgcggcctgcaaggcagcaagcatcggaacgagaaggaaggtcagcacggcccaggcaatcacgatcaagccgagccagtaaaaaacacggtccaggcgggtggatcggctcatccggtcacctcctggaacacatgcgcggcgccggggcgaattccgagcgagacggtactgccgggttcaggaagctggtcgccgatcagcattgccgaaagcgcatgaccctcgacctcgagatcgacgcggctatgggctccgaggaattcgacgtggttcactcgcgccggaacgccggcgaccgccccaagcaggacgtcttcatggcgcaggaagctgcggcctttgacatcgtatcccagcaggcgcgccgcgagtggcggagcaagttcgttggagacgccgatgaactcgcatatgaacggagtcgccggcttgcggtagagggtacgaccatcgccgatctgctcgatcttgccgtgattgagcaccacgatgaggtcggacatggtcagcgcgtcctcctggtcgtgcgtgacgaagatggcggtaaagccgagctccgactgaaggcgcttgatttccttgcgcatcgcggcgcgcaccttcgcatcaagatttgacaacggctcgtcgaagagcagcacgcgtgatcccgtgacgagcgcgcgagcaatggcgacgcgctgttgctggccgcccgacatgttcgctggcttcttgtcgagctgatcggaaataccggccatctcggcaacctcgccgacgcgcctttccacctccgccttggacttcttcgccacgcgcagcgcaaaggcgatgttctcgaacgccgacatcgtcggaaacagcgcgtagttctgaaagacgatgccgacgttgcggcgctcgggcggaagggcggtaatgtcttgcccctctaggagcacccttccgcccaaagccgggagcaacccggcaatggtgcgcaacacgctggattttccgctccccgacgggccgaggagcgacacgaacgccccgtcggccacgtcgaggttcaggtcacggacaacggtcatgccagggaagccgacgtcgagtttgttgagggacagaacgctgtcagccatggctctagacctccgatccatgcagagccgcgctcattgacggatttcaagctcgatcttctgcagccagctgtcgagctttggagcgattgcatcccaatcgatcggctgggtgttgacgagcttggcattcgcctgaacggtggccggcgacttggcgagcgcttccggcaggacagggacctggccgaacttggcggcgtatgcggccatcacatcggccgatccccaccagtcgacgaaggccttggcctcatcgagttgatcggtcccggccatgatcgccacaccttcggaaatcaccggagtgccgccgtcggtgtcgatcacctggactttcgcgtcgaggtcatcggcccgcttcaaagcgccgccgagccaattcagatcgatggaggcgcgaccggacttgaacgcctcgagctgggaatccgcatcgttggcgataatgccctcagcataaaacctgtccaggaaatcccatccctcatcggatacctcaccatcggcgtcgaggaaacggacgaggatgccggcaagatacatgcgggtcgtctgggccgccgtggagccgatgacatatttgccctcataatcgtccttcgtcagatccagccagcttttcggcgcgtctgggtcggccagtcggtcggggtagtacgcgagcacgatcggcgtctgccagaacttgtggaccaggccttccgcgtccttatattgtgccggaaggtccttggcccaggacggcgaatagggctggaagaggccttccttctttaagagggccatcgaggtgtctaccatcccgagaacgacgtcggcttgcgggttgttctcctcggcgatcaggcgatcgtagagttcgccgccccctgcgttcagtagcttaatctcatgacccgctgccttggcctgttcagcgatccatgccccgcgctcaccgccttgcgggctgtagacggtcagtgtgtcggccagcgctggaaaggccgcggccacgacgatggcggcggtcgcaaatgcaaatgccagtttcatgatgttctctcccttatcgagcgacgcgctcctcttacgccggctccatgtcagtttaattacattgcgcaatttaattttccttgcaatagctttcctgaaacttcgaccgatttgcggactttgccatgcctgttttgcccgagctctccctcaatgaacgacgcctcgtcgagttgatcttcaagaacaggggcgtggctcgcatcgagttggcgcagatgtccgggatgaccggcgccaccgtgacgcgtctggttgcgagtttgctggatctcggcctgatcaccgaggaggcggatcgaagcggagcgcaaggccagccacgccggttgctgcagctccaggcccgccgtttctttgccgccggcgtcaccttttcggtgacccgcatggaagtcgtcattatcgatctcagcggctcgatcgtggcaacgagaagcgtggaggttcatacggcaagtccaatggaagtggtggaggcggctcaggctgccgtcgatgacatgctcgccgccttatccatccagaagaacgaccttgtcggaattggcgtttccgttccgggaaattttggcaccgcctcgaacctgttgaaagcccatcccttctttcctgcgttcgaagacggccaggcgatcgaagcgttccgtgaggcgttcgacgtcccatgccatgtcgaaaacgacggcacggctgccgcacttggcgaatacgtgttcgcgggtgacaacgtgctggatgatccgctgttcttcatccacatcggccatggcgtcggcggcggcgcggtgatcgacggcagaccttatggcggcgcgcacggcaatgcttgcctgccgggtgtcctctatccctacgatcagccgcggccgtccgggcaggaccttctcgcgacgttgcacgcggccggtttccatcttcgagatttcgaggagatggacgcgatgcctcaggccgctcgctccaccgttatcgaatggatcacgcgcgctggcgcgcagctccggcaagccgtccgtgtcgcaacagcatttttcgatcccgcgcgtattgtcgtaggtgggcggttacccggcgatctgaataaaaggcttgttgaaacgatcctgtctgagccgatagaaggaccatcgcgaggtctgccgaccgctccggtttccgtatctcgacttggcattcgcgccggcgccgttggtgccggctgtgttccgttcttcagagcattttttacgggtgccgtcgccaatggtggaagcgcctacctgaacggtagacgaccttttcctcggactcccgcccaatagttccgtgccggaacacgcaacgctaccacagccccaagctgtgcagccggaagctgttgcacatgaggccgactcgtcaggaaatcccgcgcaagacatgtcgagaccactgcagacccgccccttgagcagggagcttcacatgtccgagctgaggatattctcatcgtcagaccaatcggcgccggcaggttattcccttacagcgccgcgcgtcttatcggacgcgcaaaggtcgctgtagcgctttgaattgctgcatgtttttccttgagccgaggttgattcaaagagacatgcagtagagtgacctttgagcagcattccaacaggcgaaggctgtcgcatgtctaactgtgtgtagcatctctaaaatgcttcactccaaaaaattgggacctcgatcggggttccaccggcgcatcaggacccttccgaaaatcgtcagtttattgacagctaagccttgtagaagattcggcgcttccgggattttgcagccgccctccatgattgcctgcttcggcagtggtcggtgatcaccgtcgattttgagagctcctgcttctcaaagcactcggcgcaatccttcatattgttaccgaggagacaatatcgatgaatgtacaacggcccggacttgccgtgggcccccttttcgagaatcccgaatcagaaagttcagaaccagggtctccggccgccgccgcacgttgggtcgaagcctctacggaggcggaggcgtccgccgcctcctcgtcgcaaggccagatcgtggcagccccgaccgccgaagaacggccatgggagggtcgtccgcaagaggcggtaagtcgaacgagggcctggcgggaggcgggcgatgtcgatgagccgctggatctgtcgttcctatccctgacccccttgtccatccccctcgtatccgggctccggcgcctgaacgtcaacaacaatcagctaggggatctgccagacaccctcccgggaacgcttctggagctggaggccagcgagaaccggctgacccgcctgcccgaccttcctgccgggctccagaggctgaacgtcgaaaacaaccggctgaccaatctccccgagcccctcccggccgcgctcgagtggctgggtgctggctacaaccagctaacccgcctgcccgagatgattccccccgagcttatatggctgggcgccagaaacaatcagctgaccagcgtgcccgaaagcctgctgacgcagctaggccaatggtctagcattgatttggaaaataatccgctgccgcatggggtacaaacaaacttggtgacagccatgcatgccgcgggttacgcaggaccgcagatctttttgcctatgggaccggtggaacttgcacgacggccccttcacgaggttgtcgcggattggctcgagggggatttggaaacggtggccgcctggcggggcttcgccaacgaacaaggtgcccgggattatgcacatttcctcgaccggctccgtaccaccgtgaactatggcaatgatgcgttccggcaggcggtggccataggtctgcggcaggcagtggccaggccgcaattgcgcgcacagtattttgagcaggcttccggagctagcgatagctgtgaggatcgcattactttgacctggaatggaatgcagaccgcacttctgatcgctgatgtagaggacggggtctatgacgggtcgctccaccagcttctccagcacggccgtgtcatgttccgtttggaggcactggacgggatcgcgcgcgagacggtcaactcgcttcgacgtaccgatccggacgccgacatcgacgagatcgaggtctatcttgcctaccagacacagctgcgcgacaccctggagctgcggcacgtcgccccagacatgcgcttcttgaacgtctctcacgttaccgaggaggacgttgccagagctgccagttccgtgcgggaacttgaggcgaggggattcggcgagtatgtggcaacgcgctggcaaccttgggaaagagtcatgaggcgcatcgcccccgcaagccatgcagcgatgcaggagcagctcatcgaagcgatgggagaggagttcagaagccgcttggacgaaaagctcgccgagcacggcctgacgggtgatgccgatgccgaacgggtattcggagccgagatcctcaacgacatcgcccgcaggatcaaaggcgagacaatggagaaggtgcttcggggtcgcggtcttgagctgtgaagcggccgtccatgcggtggctgtcaattgctgttcctgcggcggtcgcccgcgtctattgcgcgaccgagatcaggttatgccaggccggtagcaacggcgccagcgacggtgaattggtgcgcgtgggaaaccaccaaagccgttctggccgggacggacattgcaggtgttgcgggcgtcacggaatgcgttttcaaatgaaaagctcgagtcattgtagttttctaactcccgccattagaccgcccgcccactcgccggccgtccctgcccagtcggtaccattcaaggatacggtttacgaccatcgagtggcgcagatcgtgaacgcgtgggccggctttgcctttcaacccggcacgacgtatgacgtctgtaagcaaccaggtgatccttcctggcgtggagcgggaactgccttgttcgtgccagaacagggcggagtgaggagcctgctatgcgccgacccgacgccgtgcaacgatataggtccgaagctaaccactacactgtcgggaagcggcaggatccgggtcttgaagaactttgtttgccgaaccgtgatggtgccgtcgccgaggttaacgtcaccaagatcaagtctggccaattcgcctcgccgcagacccgcgcaataagccagcaacagcatggtatacatgttctcctggcgaagtgcagctcgcggcgatggataggatcgcgcaatgtcgagcatccgtctcaagtcggcaggtgagtagatatggggctttcgccattgcctggccacctccttccggggtctcggatccgaccggcgcggagggaccgacgggtcacgatgccgtaggattttcgcgaaggcgcgctcgagtttttcgcgctcgtacgcatggttgcgcgtgcccttcgttgccgcccactgacacacactcagcggctcggtttccagttacgggttcagctgcaggaaccgatcgaactgcaagaacaacaccggttgcgacgtatacttgtatcccctgcgacgcatcatcgcgacatgctcagccatgatcccgcccagcgctgccgaacggttcgggctgacgcagttgggcaagagcctgttctggatcacatgatatcaatgcgcgccagactggcatgcactgtttgatgtggcatgcctcacgcaaatcttcgacgggattgtgatcaatcgcagccgcttccaagaagtggtcgaggaaccgatcgataatgcgggtccgatgtagcagtgtcgtcgcagcccaacggtcagacgactgccgcaaccaggccagtagcacctgttggtcgagtgcctcgtgacgttcgacaacgtcctggaagccatgcaggacttgacggtaacaagtccggcttttgatactgcgcagatcaaggctcgcgacatagcggccaatgtacgcgcgatcgggatcgggccaacgggcggtcatgccgacacctccgttcccggcaaatcaagagcgatggccctgagatcctcggtcgcaagcttgaggtagggcgccgtcgacgcaatcgatcgatgccccaacaactcaccgatgatcttttgtggcaccgcggcgcgcaacagttcggtcgcgcgcgcgtggcggaagatatgaggcccacgcttgccccggggtttgacgccagcgtcacgtagccgccgtcgaaccatgctgtatagcttgtcgagcttgcgatagggtgcacgcgtgcgaacgaagagttctctcgcatctgtcgcgggccgtccggaacgcagataaacaaggattgcttcgccaaccggctccgtcaagggaaggagcgtgtaggcttgcgttttgctgtgacggacacgaatggtttcggtccgccaatcgatatcctcaatccgcatgttgcggatttctcctgatcgcagtccgtaggtggcgagcagttgtaatatcgcatggtcccgcaagccggccggcgttttgtccctgctcgcacttaccagaaccgctgcgatttggtcccgctccaaaatggaaggcacgccttcataggcgtaaagccgcggcgccagaacatgcggcgacaggtccgttccaatgagccttgtccgatggagataacgcagcagcgagtgaagccgctacgctgcgcatttcagcgaactgcgcgtcagtttcgaggcaagcatgtccacatagcggtcgatgtcgccgacgctcacttccatgaggccttcggctccgcatcgttccagttgccagcccaggaagtgtctggcctcccacaagaacgcgtcgatgctcgcccgagcaagaccacgctcctcgcgaagccaggtttcgtattcgttgcagatcgcaaaccgcagtgcgtcggcggcgcaggttacttttggagcaggtggccaccgatcctgcacaagtcgcagcagtgcgtcacagatatcgcgctacctcggcttcggtcacatctgcgaccagaattcctcgctgcattaaataatcgagaaactcctgtgcataggcgcagtaatttccgatcaccaccggactatatcggtgactgctcagtatggctttgagttcagtgattagttctcgttcagatttcgacatcaatagctcctctgctggtcgaatgaccgcagaggttcgctggaaaataatacagagcaaagacggcgacaaacagcagaattgtattcattttctgcgccggtcccgcgctccttcgcattatggtcacctgatgattagtcaaacgggggaagacggatgcagccgacgctgaggcgattagtgaggcagtgacgcgcaagacgatgcgcttcgttccggtgaaaatcccccgaacagcaggcggcggcgatggtattgaagacacgtgcccttctggttcgtcagcaaactcagacaatcaacgcgctacgtgctcacctgtccgaactgaggatcattgccggcatcggcacggtgaaaattgcaagcctgatctcgccgataaagacgagccgcttcggatcgaagcggtcttgccaggccttccagcgggctctgcgccgtgcaatcccgcaacgattccgataggaaatgatccgctctcgtttttccaagtccggccctcaacggaaccaccggggccctcaagccgatctgttggaatgcattcgttcgcatattccatggtttgaataggccccatacaaaaaatggattttcccagtcttgccacatggtgcatagcgaagctccccacgcgtgcctcgcctacgccacctttcgttggggcatgacaccacgacaatagagaaaggctgatagatgaagaacgtcacatacctcttggacccggagtctttcgcactattgggattgccgacggtgtcggcctcgcgccgatctttggtttgctcggttttgccgcctagtgcagatgatccgctttgacgattcgcatgcgctattcttagatgaagaagtaccgcgcgatggggaacagcgttcacggtttttgcctaggccggtggaacacgaaggtaagggcacttgtctgccgcgcctgccagacaatcggaaccgaaaacacggtccaccgctattgcacgcctcttactgccgcccatgttgcaaatttaacccgaattttcggaggtatatctcatgaatcgtaggaccgtgctgatgctcgcatgcaccgcagcagtcgccacatggctcgtagcctcgccggacgtgcgggcggaccccgttgcggatatatgttaccttttttgcccagcggagcaggatgacaccgtcggcgcgttttgttcatctttttgctcctcatcttcgtcccttccgcttccaacggaccctcagagcggaagccaggtagagagtcaaaatccgactcgaaccacagacactgcgagccgaacgtcagagaagccgtgacaggagtagtacaattcaggccttggcggatcgtctgggtctcgaaaaaacgctctccagttgcagagccgctgtcaaagatcggtaacacgttagcgattgtttcggcgagcgatgtggctcgacgcgcatcgcgatctggttggcttaatggcgcgagacctgtgtcggcacagcggtcaaggtaaccgggcgccaaggcctgcctgcggaggaggtcctgggctgcgctgctaatgtcgcttggcacgtaaatgtgagaatgcggctgtttcagctgggcttagcatttaaagcgggtcttcctcactttgtgtggttcactcgccgttagacatcctgccgctatgggatgcaaaccaaatcgaaatggtcgcccggcccaggggcaaaagttttgggtgtcgcgctcaccgatgatgacagttgggttgtttgcgctgccggaccagcgttcggcatttgcccccccctgattgcggacggcggacccgaaatcggccggctggaccccagaagcctgcaagatctgccggtccagggcaagaccgtaacggtgaagcttcggttgagccgctggcggtgcgcacatcagaactgtcagcgacaaacgttcaccgactgactgccgacgattgcttccccttatgcgcgccggacaaggagggtctctgagattgtcggtctgctcggtcatagtgcaggcgccgtcccggcgagcgcttgatgcgaaggctcggcatgccgtccgcgacgacacgatcctgcggcagctgaagcgggatgccgcgccgcgctcgctcattgcgacgccgcaagcgcgtcaggtggctgatcgattccatctttatgcagatctgcgggttgcaatcgaggagcagatgagcctttccggccgtgccaggggacgagcattgctgccggacaaaatcatcgggaacgcgcaagtcgatctgattcaggatgatcctcacgttgacgcaacgcatcggcgccgggtgcgtcacggtcatcgacaatcacggcaggtggtgttcgagactgtgcacgccttgcgcaagaaaggtctgtcctgttcggcgatcgcacgtcgcaccggctacggccggcgcagcatcgcaaaatggctgactttcgagacgccacccgaccgacggaagtcggtgttgaagccgacatcacccataaaagatggcaatcgctgcggacggcatctgtacacgatatcaaacagcgcggttacatcggcagtttctcgaatctcgagcgacttctcgcagcctggcgccgcgccgagaggtcgagcaaggacagtgcgtcgccggctcctatcatacccgatcaaccggctcgcgatgttgtcccgatgcgggatccggagactggccacgtgatctcgccggtggtcgcagctgccctctgcatgaggccgcgaagcatgctgacgatcaatcaggcgagcaaggtggacgccctgaagcagcgatcacatgagtttgtcctgatgcgcagccttgccatgcgatttctggggcaacggccaggcagaaggccagatcgaccgcctgaagacgatcaaacgtgcaatcgatggcagagcaggcgcggagctcctgagagcacacatgctgccgctcgacaatactcatcaccacacagagtggccccacacccttgaggagatggtccttttacgccgtgcatcacggtttatcaggcaccggctatgtgcgctacgacgaccgacttaattatcggcggcacgcttcggagctcggcgagggagacattcactttggcaagggccaagacggcaatgccattccgctcagccgccggccagcatccagcggatcgatagataagcaccccgaaaactacctcgccgcagtatacccgtcgcctatggatgtcctaaataggagagttcgtcagcttttcgaaagctcagccgaatagcagtgggaaggccaagaccgaccaacctacctgaattcagaaatgggcctccatccaaatttcgcaatgcattacttcaagcaaaatctcgtgccgcggaggcagtcgtcacctgaggcgttaaccgaccaagtggagctctgccccagcgagccacataactcgcatgcagctcttcactgccgaaactcctcagacgccagtaaaccctgctacccggcaaggacgagtatctccccgtgcggatacagggcggccgaattgctttatacgaatgcaaacgacatctgcgccgggccgactgcggggtggctcctgaatctcaataacagcgcgccgccccgaacgaacgcgctatccgcggcgaggagtctgcacctgcgcaccacagcgagaagttcatgcgcattttggtgactggtggcgccggctttatcggatcagcgctggttcggtatctcgtgagcatcaacgcggaggtcctgaacgttgacaagttgacctacgctggcaacctcgcttcgctgaagccggtcgaaggtctccgcaactatcggttccttcgcgccgatatctgcgaccgagtggcgataaacgaagctttcgagacgtttcagccggattacgtcattcatctggcggcggaaagtcacgtagatcgctcgatcaccggagcggacgacttcgtccagactaacgtgaacggaactttcacaatgctggagacagcgcggcaatactggagcaatctgtcccagaatcggaaggcattctttaagatgctgcatgtgtcgaccgacgaggtttatggctcacttggagaccgcggtcagttcgaggaggtttcaccgtacgacccatcttctccctactcggcttcaaaggcggcgagcgaccattttgcaaccgcatggcagcgaacatatgggcttcccgtggtcatttcgaattgctccaacaactatggaccgttccacttccccgagaaactgatcccgctgatgattctcaatgcattggataggaagcctttgcccgtctatgggacgggttccaacattcgcgattggctctatgtcgacgaccatgcccgagccctttggctgatcgtcagggaaggccgtcctggtgagaaatacaatgtcggaggtcgcaacgagttgcgcaatatcgacgtcgtcaaccgcatatgcttgctcctcgatgagcttagtcccaacgcttcgcactatggtgacctaattactttcgtgaaagacaggccgggtcacgacgcacgctacgccattgacgccacgaagctcgaaaccgagcttggctggaaggcgcaggagaatttcgataccggcatacgcaaaacggtggaatggtatctggaaaatggctggtggtggcaaccgctgcgggacaaggtttattccggtgagcgcctcggtctcctggagaaagcgtgacagatgcggctcgcggtgaccggcaaaaacggacaaatcgccctcgctttgaaggcgcaggcgcgacctgacgtcgagatacttactttggggcggccgaatttcgatctggcttgccgctcgactgtcgcaagctccatcagggatgccgcaccggacataattgtctctttggccgcctataccgccgtcgataaggccgaaagcgagccatacgaagccttcgctgtgaaccgcgatggagtgcaggcactggccgaggcagccgccgggctcggtgtcccagttattcatctttcgacagattacgtgtttgacggtgcgaagccggtgccttactgcgaggaagaccgcacaggcccgatttcagtttatggcaggtccaaacttgagggtgaatttgcggttgcctccgccaacccaaatcatacgatcctgcgcacttcatgggtctattctcgatacggccaaaacttcgtgaagaagatgctccggctcgccgatacgaatgacgaattgaatgtcgtcgccgatcagctcggctgtccgacatcggctgacgacatcagcgtcgccgtcatgacgatagccagacggatgctgtcgagctcatcggctgatttgcgcgggatattccacctgtcaggatcgggtgaggccagctgggcggccttcgcgaaatacgtcttttccgtttacgacgagataaccgggcgccaaatcaaagtccatgacatatccgctgcagaatatcccacaccggctcgccgcccagcaaattcgaggctccactgcgacaagcttgagcgaacctttggtatccgtctgccaaattgggaggagtccacgcgccggctggtttgggcgctgcttttagaagggaaagatgcgtgaagggaattattctagcaggtggcagcggtacgcgccttcacccgatgacgcttgtcatgtcaaagcaaatcttacctgtctacgacaagccgatgatcttttatccgctgaccacgttaatgttggccggaatccgcgaaatcctcatcatctccacgccgcaccacatgcctctcttccaggcattgctgggggacggttcgcaatgggggatctccttaagatatgctgttcagcccagcccgaacgggctggcgcaggcctatgtaatcggtgccgatttcgtagctggttcaccctcttgcctgatcctcggcgacaacatttatttcggccacggcttgcagggacttttgcagcaagcggccgccctccagcaaggagccacaatttttgcctatcatgtcaacgatccggagcgctatggcgtcgttgagttcgatgagggcatgaacgcgctctcgatcgaggagaagcctgcggcaccgaaatcgacctgggccgtcacgggactttatttctacgattccgaagttgttgacatcgccgccaatctcaaaccttcagcgcgtggcgaatatgaaatcaccgacgtcaacagaatttatctagagcgtgggaaattgaaggttgctgttttggggcgcgggtacgcttggctcgatactggtactcccgacagtttgctcgaggctgcagagtttgtgcgcacactcgagaagcggcaagcattcaaagttgcctgcccggaggaagtcgctctggcaatgggcttcatctcagtagaagaatttgcgcgaattgcggagagggccggaaagggagattacggcgcctatcttcggcggcttgcgtgaagcgccgcgtgatcaagatggcaacaagggctagcgacatgcatcttctgaacgttccgctcagtcagccgcacttctttgacccccacagtgcgtggctgcgacatggcccctttgggatgtggctggttcacgcgttgcggccgcggcgaattgtggaactgggcacgcattacggcttttcctacttttgtttttgtcaggcggtggccgcgggtgatctggcgactgagtgttttgcggtcgatacatggcagggcgacgagcatgctgggttttacggcgaagagatctatcatcgcgtgatggcccacaatcagcaatacgtcaggttcagcaggcttttgcgcaagaccttcaccgaggcgctggacgacatcgaggacagttccgttgatctgctgcatgttgatggtcgccacttttaccacgacgtaaaagcggatttcgaaaactggattcctaagctgtcgccccgctcagttgtgctgttccatgacactgaagtccgcgagcacgggttcggtgtttggcaatactgggcggaactcgcagccatccgtccatcgttgaacttcccctatcagcatgggctgggaatgctgttctggggcaaagaaattgcggaggggctcgcgccattggcgcggacgcttaccgacacagaacggctcaattggccggtcgagtactttgccttggcaggtgaaagctatgtgcgcgacgccacgcaacggggagtcataaaaaggttagaattggcggaagcgaccatcgaggagcgtaaagccgagaccgtgttggtgcaacagaagctgcaggaagcgcgccgccgaccgctcaaacaattaaaacgcaagctggttttcaacatgttgcgtgcagctgcgaaggctagcccgccgctgccgtcgcgcaccgctgagcgatttcgccgttcggcggccaagcgcgatccgatgcgagacgatctgcagacactgagcggccaaggcttcatgacctatgaggcggtggtgcgaggctgggggaagcagcgtcaggcgctggccggccggctgagcgagcttgtgcggcgcttgcagaacggaccgctgatatctgtagtcgtgcccgtttataatcccgatccggccctgctggtcgaaatgattgagtcggttcgagcgcaaagctatgccaattgggaattgtgtctggctgatgattgctcgaccgatcccgaagtgggccgcgttctgcgcaactacgccgcacaagatccgcgagtgcgcgtggtctttcgtgaagcgaatggtcatatgtcgcaggcgagcaatagcgccatcgagattgcgaggggcgcctacattgcgcttctcgatcatgatgatcttttggacccggatgcgctggtgctggtggtgcaggttatcgatgcgcatcctgatgccaagatcatctacaccgacgaggataagattgttgagggcggtactcgttgcgatgcgcatttcaagcctgattggaaccgcgatttgctttacgggatcaattacatctcgcatctgggggtttttgatgcggcgcttgtgcgcgaggtgggggcgttccgcgagggctttgagggcgcgcaggattacgacatgcttctgcgctgcatcgagcgtgtccaagatcgccagatccatcacattgccaaggtgctatattcgtggcgtgcaactcctggcagcgcggcggcttcgaatagggcgaaaccctacgccaacgaagcgggacgccgcgcgctggaagagcatctggcgcgtaccacgggcaaatcgattccagttgtgctgggcccgattcccttcagctatcgcgcgctttggccgatggaggggacgccgctggtctcgattattattccgacccgcgaccacctaaacgtgctgcgcgcgacggtggagagcattttgggtaggactatgtatggcaatttcgaactgatcgttgtcgacaacggctcggtcgaagcggataccctggagtggttcggtcaaatcgagggcagcgatcggcgtgtgcgcgtgctgcgagacgcccgccccttcaactattccgcgctgaacaatgccgccgttgcgcaaagtcgtggtgagatcgtggcgcttgtgaatgacgatgtcgaggtgatcgcgcccgactggctatccgagatggtggcattggcgcagcgtccgggtgtgggttgcgtgggtgcgaagctgtactatccagatggccgtattcagcacgctggtgtggtgattggtctgggaggtgtggccgggcatggacatttgctctatccgggtgagcacgccggttatttctgtcgacttaaattgcggcagaactacagcgctgtcaccgcggcctgccttgtgatcaagcgcgagattttcgacgcggttggggggctgaacgagtccgagctgaccgtggccttcagcgacattgatttgtgcctgaaggtgcgcgcggcaggttacaacaatgtctggacgccatgggctgaactctatcaccacgagtccgccagcaggggccacgaagacaccccggaaaaacgggcgcgcttccggcgagaggtcgactatatgaaaaggcgatggaaaacgcatgacttcgccgatccggcttacaatccaaacctagcacttgagagaaacgatttcgtattgtcttcacctcgttggtgtatcagcacgaaactgacgtgatggccgaattggctggccccttacaggcgtgtagcgctgccgtggcaactgttggggcatccaggcagctcgcgcatctgaaccagcttcgcttggggtcgcgttcgactatcaccacgccagaggagctcatcgggcacatgggcaagagagtcatgcagtcgcaaagaatgatcctgaactgcgaatccgtgacctaactgagctgggtttgaacgaaagcgcagattccaccgattccgcgttgcgtgcctgcgacgggattgtcgacgcaaccgccgacgcgcactgctttaatttttgcgccgcggtcgcagcctctcatatggggagaagtgtttgtcggcagcttctgctttccctctgcaaggaagcctgacagcaatctctccattgccgccgtcaagtcgtccggcttctcttcgcggagcctttccgcctatgcgacgaaagccgagagcaggctcttcatttcatccggcgcgtttctcgaaccgcctgagcatctccagcccgctttgtgcatggccgagaaaatcggcgtttcgctccgtaatctcggccagcatctcgtttgtgatgcgctcgcttggcgcggcgaattcaccgtcgaccgcagtccacgtaaaggacgcgttcttggctcggggcgacgtctcgtgaaactcgtcctggctctgcccgaacgcctccatggcagcctcccagtcgccacgggctttcgcatctgtttcggcctcggagcccttcagcatatacgcattcgatttgttcttggccgcgtgacccccgaaggctgccagcaccttcttctgttcgagctgatcagcacggcccagtccccttccgggcgtaccggggatcgcttgcattcgccgcattagcgtggcgatcgtttgagcaatctgggttttgcgtcgcggtcgacagatacggccacaggcgcggaatatcggccgccggagggccgggtggatttgccaacgttggcagggggcgatacgcaacgcggcctgggagcgagataatccagtactcgccgaagctcccactgatgagtctgctctggatcgaacgctacgcgctcttggacgaaagccgacggagcggattgatcctcctgcccttcccgaagctcctgtaaccgactgctagcttcgcgcgacggcctgggctgcgcagtggcgccgccgataagcctcggttccatcagtactgcgctttcaggattgatggggaccacagtctcgagctgaggactgagcttagctcgaggacctacgatgggcgcgcccgccgaccgaaaggtccggagatggtctattgccccaaggagtttgccgggattaccctttccgatgaacgcggacacgtcaccgctcaatgacttactgtcgacctgagcaacaaggcttggtttgttttttgcgaagagccaacggctaaagctacgaagaggactcgcatatgtgcaggcggagtctcttgccatcccggccttgatgaaggcctcctcaagccccaagagttcgtgagcatcctcggaataacaggccgctcccacggatccccgcgggccacaatcccagttggttgagccggttgcagcgccgaggcggctggcattgccccaccaccttcacctgaattggcgacctcgctcagctgctgctcaatggcaagggcttgcggattgtttagggtcctcggcctcttcgctgctctcaactcagctgtgtcatgctcatcgttgatgaggatttcctcgcttggcaagaggctgctcgtggcaactgcacccatcggctcgtccggggactgctggctgtcaaacacattcgttgagggactacggtgtggcccctgtcaggcatcgcgttatcggcttggcgcgcctcgtgtaattgctgctcaaagtcctcttgcccggatcggtccggttgatgctcttgcgagacctctatctgcggcccggcagttacattgaacgattcaacattgtgcgggtccacgctagcctcacgccatgaaatcaattgagctggtcctattaggataagctttcgagaagctgacgaggacgtcgctcgtgaagcaaacgcaccccgagaatgccctgcggtcctcgatgggtcgcggggcctttttgcgtttaaggacacgtcgtcgcggctaatacagccttttggcagcgccgggggcgagacgcgttagcgctctgttgcgaagggcacggcataccggcgccgccgatcgtgtcgagcgtgatacttgcactacggacgtcgaggccgtgccctgcaaagggggcgcgcatggcgccagcatatagcacgacacgcgtgaccgaaagatgactgacggctggagatgtggggcaagcgcctgacgcactactcgccatgtcggccctgggtttgcaacaaaggcgtcgtcaagtcggaccccacacagccaagctcggagccgatcgtcggcgatcccgaatttcggcaagattgataaactcctcaagggctgggatcgtctcatccatgcggccactgcttcatcacgccaatattgcgcgagaacggagagcacgtcattgccatgtgcagctaactggctttcgatcaagtaccttcgcttcacttcccgataccgtccgcatggcacttgaatcccccgccatcacgatatgatctgtttgcgggtaaatcgatcaatcgtttgaacgggtctcgggatatttgcgcgcgccgcgaactgcgggtgcgagcgccccgcacggggagagaccgtaagttcgcgcccattcattctaaacccgagtgttttggcgtatccatagtgctgatgagtggcatgcaaacattcaatttttccagcgccaccgatgtctcgtaaaactagagatgtaaatgtgattcagggtgtcacagaagaaattcggacttgaaaaggggaggaaatgttcgctctcaggataatccatatcgccctatcgtcgccacaaggagacttccaagcggagtcctttgcgcgcgcgctcaggtccggtggatactgtgcagaagaagcagtggggcgccatgcgttgtgatgaaagatttgccgcgacttttttcgtctacatatcatccgcgtcgactctacagccggtacaaaaatcgcgccacggccccgttttgtttgagggaatgccggggcccccttgcagtgggcgcgcagcggtcggctgtcgcggagaaatgcacagggcatgctgcaactggagtaaatgtgttgcgcggcgttgtgtaccgatcaggcgagcttaccagtcgtaatatcgcgccggatctgagtctcccccaagtggcggtctgctgcatccgattcggcaacccctttctgcgcggcagggttgggaaaagaagacacgcgcccgctgatttttcctgagccccttttagcttgaagctacttgaagcagttaaccgcacgagagggcctgcacaatcaagagtgaagtagtgacacctggagataaaagatcacaagaactgctgatcgaggcagcatggcatgcatatcttgcaaagaacttgccaaacacagggatgcgcgatgttttcattgcggggtacgtggcttgcaattcaattgcatctcacgaatgtgaatgtaaacccgactatggttcatgttgggccgtatctaagctggttagcaagttccgcatctggcgacgcaacgcaaagtaaacatgcgcgctacgcaatatcaatcgagtaattgatggatacaatggccaattcaatattaggacaggaaatcactttcctcaaacttgatacccgagtgatcaaaaatttcgacaaggttcttacgaataatattgaggttgtggaaacgtctctgtggtctgtagtaagaaagaacgccttaaaaaagggcgcagcaaaggcactgcaagcctgcgcgtcgtcagtgctgcacaaaagatcggactatgaattcttgaccaccggcaatgtgctgcgaaaaaaaattcgcctcccgcgtttgttcggcaataaggtaatttccgcggcttactcgtggataaaacgcgtgcaggcagcgcttttgctcgattatttgaaagaacatttatcccagtatgactgggaccagctgatagttgtcgtgtttaacgggtcgaattatccagaaagcgtgctcgccgaagcatcgaagggatttaagcgcgtttttgttgaggatgggttttttcctgggacgctccaaatcgacccagtaggaataaacgctgcaaactccgtgcctcgctgtagcgctttttataaaagcggcagggatttttcggagggagggttaccaacagctgtgaccaataggtcatcaaaaagaaaatttacccctgtcgatctggccccgggctttgtctttgtaccgtttcaggtcccttccgatatgcaggtaacgcttcattcgccttgggtgaaagacatgtacaatttttacgatatcgttgttaacgcagctgagcaaaatcctgaggagatgtttgtcatcaaggagcatcctagattcaagagatcggtgatcggcagtcgtccgccacacccgcgcgtgaaatttgcaaacggaaatatcacctccgaacttatctccaatgcgaggactgttgtcacgataaattcgacggtaggcattgaggctctgcttttggggaagcaggttattacgcttggcgactcctgctacaacattcaggatcttgtgttgagaggaaatgatatgggccggctcaacgccgcacttgcgcttcggggatggcttcccgacgatgaattgcggaggcagtttctcggcttcctgtggaattactacttagttaagggtagctttacagaaccaccaaccgccctggcctctcggattctcgattgtttcgaactggactcagaagtgagaggtgccatcgcaaatttgaacaattgaatccatctctgcagagttctctgcgcctcttcaggttgtgagtgttttaccttatggtggtgggcggcctcggctcccgaggcctcctccaccatcagaccacgtcgtccattttttattgcacgcatttcgggcttgcttgaggattgaggcagttccagcgttctgttgatgggattgcaaacgttgccgatggtcttcgagagtgcgtcgaaggtcgttttgaagttggcgagagctacaccttcacgtattgaaacgagaccggaagttcgcagagtgatggctgactggagtccttttccgacagaacgtacgtggtcatctttggccaattgattccgatggcgggatcgtcccatttcagtccgcgatcatgttcagcgctatagggcgctgtcaccttgtagctgattaccgtgtccgccttaagcgtcatgaaaccatgcgcgaagcccgcaggaacccaaagctgcgcgccattttcctgagatagctcggcggaaacccatttcccgtatgttggtgacccgaccctgacgtccaccgcgacgtcgaacagcgcgccgcgtgtacagcggacaagctttccttgcgcgaaaggctcgagctgaaagtgaaggccccttaccgtcccgatctgagcggagagtgattcattatcctgaacaagtccgacatcggcaacatttttgcggaaccatttttccctgaatacttcgctgaaatagccgcggcaatcgccaaacttcctaggcctaattaacttgacttcggctatcgacaggctttgaaaatacatttcgtccaactcagttccgcccactaattctcgtgctctggcaaggagttgaggataaaaaccgaacctcaactcatagcgcgattgtgggctccgatccagagactcacttaggcgctcggcaacagctgcaactcataaaggcggcggtatacgccatcttgtgaaagcaatcttccctgcggtccttgttcggcgacctgaccgccttccatgaccacgatgttgtcagcagctgtgaccgtcgagaggcgatgggcgatcatgatagtggtccgcttccttgtcagccgggccagagcttggcgaatctggatttcggattccgaatcgagtgcgcttgtcgcttcatcaaaaatcaggatttctgcgttccgcagcatcgcgcgggcgatggtgatgcgctgtttctggccacctgaaagttttatgccgttttcgccgacctcggtgtcgtagccatgaggcattttcataatgaaatcgtgagcgttggccgtcttggccgcctcaatgatctcctcgtcggacgcaccctcgcggcccaaagagatgttgtattttatcgtgccactaaacagaaatgtgtcctggccaacaaatcctatccgatcgcgcaaggaacggaacgtgacatccttcaggtcgtgcccgtcaacagttaccgagcctacgtcggggtcataaaggcgcataatcaagttgataatcgacgactttcctgcgccggaaggccccaccaaggctgttgtctttccggctggaaatgtgacgttcaaattctggaaaagtcgttctccgttcttgtaggagaagttgacatccttgaagcggatttcaccagggccctcaggcaatggtattgcactattcttctcggtcagttcaatgggatgatctgccagttggtacatcatgcgaacgcctacgagtgccgattcaagactgatgcgcattcgcgcaaggcgctttgcgggctcataggccagtagcaatgcagtgatgaaggacatcagttcgccgggcgtgttgccctgctgcagcaccaacactccgcttagtgcgatcacaccggcaatggcgaaacctgagagggtctccatgatggggctggatgcagcttccagccttgcgattgagttagcccgccgttcgacatctccaatgtacttgtccatccgccttctcatgaaatcctcaagcgcgaaggcctttacaatccgaattcccgtcgaggtctcctgcacgctctggattatctgtccgattgaagcaatctccaattccatgatcttccgcacttttctcgttagcacacgaaccccgaggatagcaccaggtccaacagcggcggaaacaagtgaaagtaacggttgttggatcaccatgaccgcgagcagccccattaacgaaaacagatcccgtatgaaggaggttacgacgagctcaatgaccgaacgtaccgcctgcgcattgttggtgaggcgaaccaacagttctgaagatggataaatcgaatagaaagacagaccctgcctaagtacgtgctcaaaaagcctgcgctgcgtatgtgcgattatattgttgccagccttgctgaggaatattgactgcacgtatgtcgcaagtcccttgactgcgaaaataatcgcgactgtcaccgcgacgccgaaaaccttttcaatgtcttttgagacgactgtgctattgacaacatcacgcattatccaggcgcttgcggaggtcatcaccgctactacgaccatcgagccgattgcaattccgtaccaaggtgcctggtgtttgaaattttcagctaaaagccgcatgagaaggctttggtttgacttggaaatgaatttctggagcattcaattatcacctttccagtccggtcttggagaggagcggacagtcattttgttaagcagcataggccttcggtggcagcctaaatgacccgtgtggcgttcaaattgcaagacacatgaacctgcttgtggacacaatcatttactaaggacaattccacagtgctatggatcaaacccttagtcgccgcttgtttctatggcacaacccgcagactgataaccagtgtagaaatgaaagacacatgattcatacgtcaaaaatttaccgtgaaatcaaccgtatcggcgtgcaaatcaaggggctccccgactattggatgggccaggctagaaggatcagttatgatcgggttgggtcggcaggaaacacgataacggaaggtagaaaaccagtctcggcggacatggctattttgctcatttaccaaccacgtgggcttctagagtcgctttttttacaattagagcacctgctctcgaaaggactgggcgtcgttatcgtcagcaaccgcaaggttttggagcacgatcgcaatcggttgagtgaatattgccatctgatcattgaacgtaagaatattggctatgattttggcggctatcgagatggaattctcgcgcttcataagcgttcaattcatcctaagagcctctttgtgatgaatgatagtgtatggtttcccatacggaaagactgtgatcttattgataggtgtcgcgaatctaggtcagatatagtaggcgttttttataacaataaaagcaagttccccaagaaccatcatctacaatcatatttttatcgtttcggtgaaaaggttgtctctgatagtcgctttctagcgtattggcgtaaaataccaatgtacaatgacaaacgcaatgtcattaggaatcttgaaataaaattaaccaaaaattttcagttgatgggcttcggcatcagctctctttacgcgcctgaggatatattaaaggcgtttaaaaatatcgaagttcgaaatatccgtcccgtcctggattactatatctccgcgttgggatatgaccagaatacgttctggagcgcgtataaaaatgagtcaccaaaaggaggtgacacccatgcattaccgatagacgttcctaatagccgagttttcttccattttcttgacgctcacccagagattctcattcgcaagttaaactctccaatcattaaaaagaatcgcgataaacgctttgtcgcacaacgaaaagcgataattgagggagggtttcttaaagagattgacgccgtcattcaaaaagaattgatcaattgggataggtagttgatattgtatccaggtcgtcggaagcgtgaataatcacactatcaaatcagccacgtagattaaggcgctggttatgccccttagagcagctggaacgggctcttgatgccttacgtccgcattaatgggagtcacgcagcagcgaagtgatgtgcacattcctgaggtcgaccattttaggagacggcgcgtgctgaaatgcggcagaccactgctattgaattttcatggaatggccgaaagcaagagaaataccgtgaatatcgccagatgaacggcgccctgtagtacggtcgttctgcccgttcccagtgtgatcgtaccgacgaacagcgtcaggatcagcataatgaggttctgtggcgcgagacccaaagcaagatctcgtccaagagcgaccgatatggcagctactactggaattgtcaccccaatgctcgcaagcgcagatccgagtacgaggtttatgctattttgaagacgattcattaaagccgctttgacagaggttatcccttctggcagcagaacgactcccgcgatagttacgcccacgacggcttgtggcagtcccagcgcctcgacggcgctgtcgagcggataagaaagtagcattgccaataggatgactgcaatgagggccagcacaagcaaggctccggccgctagcggattacgcggggtctcatgggtagccggaggcgaagcggcgtcttcatcatcgatgaaatagtcgcgatggcgaacagtctgcacaaacagaaacacaccatagaggaccacagacacaagtcctatgacgacaagctgtattgcagcaaactgctgtggttttcccgcggtgacgaaattgggcagcacgagagacagtgtcgcgagtgtgcctagtaccgccagtgccgccgacgcggcattcaactggaacgactgctcgcgatggcgtcggccgccaagcacgagacagaggccgatgacgccattgagcacgatcatcacggcggcaaagaccgtatctctcgcgacttcttcgtttccctccgcgccggaaagcatcaaagaacctatgatcgccacttcgatgattgtcacgcagacggcgaggaggatcgctccagaaggttggcccacccgagcggcaagaatttcggcgtgatgtacggaagcaaagaccgcacctgttagcaagccggccgacatcaacagaagtacgacggatcgttccggcagcacgtgcgccaatgtcatagccgcgatcacacaaccgaagagcggaatgatccaagaccacagcgggacgtgtgcggacctgacctgcaatcttgatttcattttccatcccctggtgatgagtatgcgtggttccttgcgcggtaatcggcgtaacaaaactaaggcttcggaaagtcgggcgagattcgccaagtctagtcagactctagacgagccgtcgagtttggcgtcaaccgcccctcattgcagatgcaagaagtatgctctgcctgccgtgcctttcatgtgattaggtgcgtcaaggctgtcatgtacttgaaggtgcacggagctaggctccacagtccaatccaggtctcctattttgtgaggctctgctcgaggcgcacgacctcgcgtcgcaacgcttcgatcgctgcatcgcgattgcgaagcgcttctagctgtgtggctcggtcatcctcggaagccatgagcgcccgtttcagctgagccaccattgatgcgcccagctgcaggttttcacctaatttgaactcgggcagccgttgcgcttctccaagtgtggaggagctggagctaatggtgttgtcctcttcagcttgctgaaagatgctgttgtactcacacgcaccggcgggaatgccttctccctcgccacgacgtaagtcccaccaggtttgaaatacccgacggtatcgttccgttaccgctttgcccctgtccacgatcccagcgtctcttgcgtgctgaagtgactgctcgtaaccgagttccaccaataggtcagcgccgactagatcggttactgtttgcatctcttcgatggtcagttcggttcgccaagtttcgactgagcggttgtcgactgcctttttcttcaggagccgtcgatccccaaagctacttagccggagatattccgtttgctcaactcctgcaaatacaatgccggctggatcgtagccgagcccagcgatcacgcgctggatttcctcgtctgggcgctcaaccaagcgttcatagcgtacgacttgcgtgtgccggcgcccgcgttgcatcgcaagcgcgggtaggcctagcacgagatcggcgagagccagtgcgacagcagcagtaggcgtgccggttacgagctcggcgagacaggatacactggtcggcgggcacctttctgaaacgaacggaacgccccacgtcgatttcagtgatgccgcaatcgcatatggattacgcaacaaaaggatgtgtggtgcttctggatacagggaatgcaaatagtcgagcaccatccagtaccgcggagtcttgtcgatcaacgtgcgcttgcccgctgctgctaagtattgagagtaagcggcatcggcaaaaactcggctgacgctaatgcgatctatccgccccaagaattcgcacgccgcaacctggatcagtgatgcccctgctgggtgacggtggtccactctaccaaatgcctcgagtgccaacatcagccagggctcaggcggggctgtgatgtccgggtgctgctggagcaaatgcgccaacagcgtggtccccgagcgggggatgccgaggagaaaacagatcagagggagagggctgacatcgcggctcatgagttccgattccttatgcatgcttgtgagaacacatacccgccgcgcgtgagtttctgatcgagccactgggcgtgcgccaccggttggttacagtggtgtacaccggagaattcttcctcagaaccacggcacagaccgatagccatcctgatgcgccggacttcttctaaccttcgtctgctatgcgcggttctcgcaagcccggtcaaatcgtttctgccaatgcaacacatccatgctttggatgatggcgcgaagcacgaaaacgcgtgcgaagttcgacatctgggatggtgcagactgcattctgccccaacgaggaaaccaatgtgctgacatcgggaacgcattcgagcataggttttttggcccacagtggaatgtttacgaaacgcactcgtcaaccccatcaaaatgatggcctcagccctcatgtccgtcgcaaatctccattccgccgcgaacggcgcatggcgcgcgagatgatggacgaaggagggttcatcgaaattcttgtcgataagatttcgagatgacgatggggcacgccgtctttaaggcccctttttgcaccgcgcttcatacccgtcgagcggcgagacgaggtcaatctcactgccagtagtgccgctggcctttcccttggggccgatgccaggcagtgatcattaacgaccggtttttgggtggagcggctgacaaagcagcatggattttccgtcacccgcagaaccacacgtgatgaatattaagggcgagttgggtcgcgcttctagctcgcccagcggtgaggacggatgtggcatcatgaatatctcccgcttcttcttccccatcccgcttccacgacacccccaagcaactgaagtagcatttctccgggcagtcgttcccaagcagcaagggcggcaaatgtgatgcgcaccagtgggacagcccgcaacatggaagagaacaagccgactggtgctaaagcttcgtgtttctgagcaaaacgtcaccctccactccgcgtggaaactgagccaccaattcgaacgaaggcagtaggtcaagaattgcgcgcaggggcagttgaccttcatacagctcctggtcactatattcagtgtagatgaagcgcgtcttggttagagtctctttgccgccagcgatgacgtcggactcggccccctgcacatccatccagatcaggtcgatactctccaagccagcctcactgcaccaatcgtccagtctccgagtctcaactgagatgggtccgtcaaaccggacccactgatattcggaaaggtgattcttgggctggcgtattgagcctgacagatcccattcctttgcgtctccatctccattactggggtggaaatcgattctgccgtttcgatcactgatcgcgacttcaaatagcctcatcctgtccaaaggccccatgttttccctacagcgagcagcggctcgggggtctggctcaaagcagaaaagctgggccttcggacgaagctggagaaagcgtcgcgcatcgcttccatcattgcaaccgatgtccagaatcacggggtcaggcttttcaaggagcgaaacgatctgtcgatggaccttcaaggaagacgttggctttcttatgccctccgcaaattcgcgaaggcgttgctgaagagagattagcaggccttctttaagataccgtcctacttccatgaaattacacctcaatattgattgcagttgcgggtgctgaccgctggtgaggcattgagtgctcgtgccgcgcttcggtgaatcctcaagggtatgctgtcaaatgccgcgccatcactcatgagcgtctcggccccaccagcatgggtgaaggagagggacggaactaccgcgattgtcataggcgggcaccgctttacagattgattggacttgatagtggttccgctgcagagtcggcgcgcattggatgcagtcgcacgctacgctgctcccaaagcccacgcagttcatttaggagcgcttcacgctggttctgattgggcgcgatgaggtccaagatatcgccgagcggagcttctccatcaatccgcattagcagttcgaacaactcggatgaaatccgcacggcttctcggctggagggacccgtgcggatctcgcataccgtctcttggcgatctaacgccgtaaatgcacgcacttgatggaggcttgaataaggcggcaacgaaagcgcaagtctactccaatcctccggtgacgcagtccgcttcttgatgagatatgacccaaccacgagtccatccaagtcggtggtcaaaaatgtggtcaccgcatccgcaaccgaatccactatcggctcaacattattgttgaaggacgtgttgagcagaatcgggacacctgttcgtttcctgaaggcgttgatgacctcccaatacgcttgattgatgttgcgcgatactgtttgcaagcgcgccgtaccatcgacatgcgtgacggcaccgagcagattgcgcttcgattcgcgcacaggcactacgaaattcataaagggaaattcctgcctgctatctggcaattcaaagaactcgttggcgtcctcctccaacacggatggcgcaaaggggcgatagccttcgcgcttcttgacaatcgcgttgatccgatccttgtttgtggctggcctagggtcggcaagaatgctacggttgccaagcgcacgcggtccgaattccgatcgtccctgcacccagccgatcacggcgccatcggcgatccactcggctgctctgctggccacatcatcgcagcgttcgatttcaatgtggccgccccatgctattaattcctgctccacggcgcggtcgctcccgagatcaggaccccaatagacctcctgcaaacgctcccgaggtgcggactgccctagttcattagacatcatcaatgcagcgcctaatgcgcagccagcgtcgtgtgccgcgggttgcacgaagatgtcttggaagattcccgagcgcaacagcttgccgttcaatgtgcagttgtgagctactcctccggccaagctcaagcgctttatgccggtgatctcgctgtgatgccgtagaacgtgaaacacaatccgttcgagtgcttcttgcaacgaagcacttaaatctttatgctgctgagtgaacggcattccttttcggcgtacctcaatgctgcgaagcagcgtgggaccaatccggtccagatagatccggtagccaccgttgtctaatagctcgtagaactgttcgaagaggtcgcgatggggagcggggtcgccgtacggtgcaagccccatgaccttgtattcatcaaacatgccgtaaccgagatattttatggtctcaaggtacaaaagccctaaagaatcgctctccggaaatgtcgcaagcggtttgacttccgtgccggatcctaccgccaaaagacccgaggcgaagtctccaccgccatcaattgtcaagatgagactttgttcgaaaccagacatagaaaacgcgctccaggcgtgcgacaggtgatggcttacgaatgagattcgcgacggatcgacctcagtaccaaattcctgcgcgagcaacccacgcaacaacagcttggcatccaacggtattgacatgtgcgactgagaaacgagcaggcgctcgagcatagcattgcaaaacgcctcggttgcataatacgcgatgcagtcgatgtcgctgagttgaaccccggcgtattcaaggcagtattgaatcgaccggcgcggcagcttgttggaatgtttgattctgttaagtcgctcctcttcgacagcagctatcacttggccgtctcggacgagaaccgctgcaccgtcgtgcataaatgtattcggcagatcgagcgagttttcgtgaatcttgcttagaccgccactaagtcctagacacagcatgttgtctccaatctctcgtcacttgtaacaggtaggccatgtgctccgactgaatttagtcgtttgctaagctcaagcagtgctctttctgccgtaggtcaggacagcaaacgccgctgaagcagtcccacagataagaagaatggcatcactgcaaatatgcaaagcgcgctgatatgcagagcgacgcctccgcctgggcgatctagcatcgctggacgaatgagctcgattgaatgtgccagcggcagcagatgcgatagcttctgaaaaatgtcgggcagttggctgactgggaagaccgctcctgacaaaaacagcatgggtgtgaggaagagcgtctggtaaaatatgaaataatcgtaaccgggcgcaagcgctgtgacgatcatcgccaggcttgcaaaggcgaaccccgtgagtgcgatcactggcaaggcaaagagaacggatggccacgatgcaaagcccattgtggctgcaacgagcatcattgctgtcccggccaataacgccttgctggctgcccacgccagttcaccgaggacgatgtccccgagcgtgagttgggtgcacagggctgattcccaagttcgttttgcctgcatgcgagcgaaggtcgcgtgaatagtctcgaacgtcgcggagatcattgcgcttgttgcaaccatgccagccgccaagaacgcgacatatggaatgccgtcgacgcgacccaccattgcacccaggccgaagccgagaccgaacagcgaagtcacgggctcggcgaggttaccaagaattgaagcgatcgcggctttcttccatgccatgtaattacggcgccacaccgcaatccaattccaaggattggcgggtaggaccgccgcgtaacgtttccacatcgctcagtccttcatttcgcgcccggtcaaccgcaagaacacatcttcgagattcggtggacgctgcaataggcgtagaccggttcgcccgcgcaattgcaagcgcacctgttctggatcggaagaatagcaaaacagcgtctcaccgctcacttcgacacgctgagcatatggtccgacaactgaagtcagctcccgcggattgccgccgtagatctcaatcacgtcgcacccgatctgctcgtcgattagcgcgtgagggcggccttccacgatcttccgtccgtgctcgataacacacaagcggtcacataatcggtccgcctcttccatgaagtgggtagtcagtagaatcgtcttgccaagcgccaacaaggaccgcagccgttcccatattaggtggcgagcatgcggatcgaggccggtagtcggctcatccagtatcaggagctgcgggtcgttgatcagcgcacaagccagcgtcagccgcctctgcataccgccggataattgcgccacgggtacatccgccttgctctcgagccgagcgaaatcgagcagtggtggaatggcttcctcgagctcgcgagtatgcaagccgaagtaacgtccgaacaccagtaggttctcgcgcgccgtgaactcgcgatcaagtgtgtcgaattgcggaaccacccctatgcggctgcgcgccaaacgcgcgcgggctggcaccggctctccgagcactgtgatcgtgccttcatcaggcggtgccaggccgagaaccagacgcgataccgtgcttttgcccgcaccgttcggtcccagcaagccgaaacattctcctgaggtgatggtgaatgacagttggtcgacaacgactttgtcgccataagacttactgacgttggtaagctcgattgccacatctgatttggagcgagatagcgaattatccgcattgctatgcccgtggcacttctgcttgagtgcattgctctcaggccgccgcgacggtgagcttgagacatttgctcgagtcaatagctgcaatttctcgtcctatcttaaattcgcttgcctgtttggcatagccggctaccgtcaccgcagtgactgactgatgtcagcagcctcgcaagctgcgcaagactgagccagcgacgcgggtgccgcagtttcagacggctccgcagcgcttgttttagcaatggggttcaggagaatcctttacgccgttgggtgcggcagccggggaaccacgcgacagccagtcgctgttgctcaacgtgcacaacgcatatgctttgagggggagcaggagagcgacgttgaggagggtgtgcagcgaaaacccaaggaatcgcagctctcgcgctcgaaacgccgccacgccgcagcggaccattgtcatagatgcaatcatcaggatcgtcgaccaaggcactgtggccgtcagagcgagctgtgctagccccgtcaggaccgagagggctaggagcagcggaccaagattctgtccgatcacgtccagcgtaagatagcgatcaaggcccggcagtaggcggagcgcgagcaatgtgtcgcgaaacgtgctgcgtgcccagcgcagttgttggcgcagataggcgcccatcgagtttggaacgaccgtcgccgcgatggcttccggaacgtactcggttcgaaagcctgcattcagcatgaggattgtgaggtggcggtcttccccgaagtcgcttggcctgcctcgaaacagttgcgtctcgtatttatcgagcagcaataggagtgcggaccgccggtacatggcacacgggccgcagcaacacataacggctccaaagcgagcctgtgctgcgcgttcctcgttgcaggcgagccagtactccatgtcgatcaaccgcgtcagccatgtgtcgctgcggttgctggccgtcaactgacccatcgccgcgccgaccgcgggactgtacatcttcagggcaagtttcgtgactacgtccggcgcaatggtcgtgtccgagtcaacgttgagcaccaaatctcccgatgattcccgtatcgcgacaatctgcgccttgcgctttccgacgttctttggcatcaggataaagcggaacctcgggtcgcacgcataatgatcgtgtacaggtatgatggcgttgcgattgccagaaccgtcgtcaaccacgtagacccgcaactctccagcgtagtcctgctttgcaatggaagctaggcacgccgagagcgcgcgcggatcctcattgtagcagggtacgataacatccacgctcggcggtgcaccggagccggtcacgggcgttgacgcagctgtggtgtttgttggcaaagcgtatatagcttgcatgcctttgtaagccgtcgagagtgctgcatacaaggagatggctacggcgccggtcgtgccaagcagatccatgaaaaaccgtccgtttaatgattctgaggaagcgagcggattataaatccgcggtcgtgcaaggcagggatgagacgagacaacgccgccaccgtctggtcgcgaaaactggcgtcagtgttcgccaactcgtcgggagggcacccatcgtgcaggagaatgattgaaccgggccggaccgaggcgagtaccgcatcgacgattgcgtcgataccggggcgggaccagtcccgcgggtccacagaccagtgcacagccgccagtccagcgtttgccgatgttgtcagcacgtcatcgctccaaattccgtaaggcgcacgtatgtgccgcaccgaagcctcggggcaggccatcctgatggccctgttcgcctcgagtacttggcgttccacgtcccgacgtccgcaggcagacaggtccggatgggtcattgtatggttggcgacctcgtgcccttgcgcaaccatgcgtcggatgagttgcggccggtccttagcataagccccgatgacgaagaaagtcgccgggacacggtgttcggccagcacatcgaggacctcaggggtaaaaaccgggttaggaccgtcgtcaaaggtcaggtagacgctcggggccccagtgccgcttctgggcactgtccggagatagtcaagctgtttcatagttccggaccgtttcgttcgatcagtgtgccggatggccattcgctcattggacgtccaatcggaaagaccacaacgagtacgtcttcagtgcgcgttggcggcaggttgagatagacatctgaaagggtggaccgcacgcgaacgccagccacaattgtcccgagaccgtttcggcagagtctgcccacaagcttgtacagcgcgtggcgaacggcgccaaatgcgaacggaacgccaagctgctgcagcaccggatacatgacgcggatggagtggttgagcccgagtccttcgaggtccgggcgaaccccccacaaacccagttccgccaccaacagatcggcatcgcccaccctgataaagcggcgcaacagccccatgtgagcagccactccgtgagcgtcgtagccgattacacggagctccggccttgctccggcccaactgtgcccaccttcaaatggtcttgcgttgaacgtcccggtcggtccataggtcttccggaagaactcagcgagttcagtgtggtcggagagctccagctcattttcccagcacagtttccaccgcatctgaggacgcatatccaaagaactccacatcttgctgcttcttgaaacgtacatcaaacgtccgaaatggccggggtcgatggacgcccgacactgtcgtcgaacccgcattgcggaccaagttggttgttattacctgcacagtgagtgggggacatttcccgaccttcccgtatcactcgcaaatctctaccagcgacacacttgatttcttcaaacgtgagcatcttctaatagtgattggatggatccgtaaaattgattgtttggattatagccattcatcctgtggatacacccggcccaagtctccctgctagcaacggttgatgaacgaacccgacaccgcggcgggagcatcagcttcggcccgccaatcatgggcgtgcggccacgctctcgaaaacaaggaagttggatcaaagaacaggctgagacttggccgccaacggcaatgaagctaataccgctactgctcccgcgccgttcggcagatacgtttcggccacagccacggcttgttcggctcgggcagctatatcaggcagtgccgtctcgtcgatcaggcgctgatttttcctgtaggatggaacgtgggcgtaaccaaataccgcaagccggtcggggcgcattgcgaccgctgccgtcgcgctctgaacgcaggactgcacggtctggtgcgggaggccgtacatgaggtcgaagttgatgcgacttatcccaatccggcgcaggttttcaatagccgcggtcgtctgcgcctttctctggacccggttggttgctttttgaacaatgggatcaaagctttgcacgccgaggctcacgtggcttacctcggccgctcctaaggcttcggccatctcggccgtgaaggtgcgcggctcgatctcgacagcgatggtagccgttttcctgaaggcgaaactgcgacgcagaagatccatcagagccagaaaatcttctggcttgatgatggttggtgttccaccgccgaagtgcacgtcgctcacgggcagcgcctgcggcgcttgggctgctaccaaacttatctcctcactagcgccgtcagatagtcgaggatcgatgcgtctcgacgagttatgctgttgggaaatccgcaataccagcacatcgaccgacagatcggaatgtggagatacaacgacaccggatctgacgccggcaagttcctcagccaccccttactagcttcagcgccgacggctgcggagaaatccggtatagtcgatcgtgtaccatggtaggtgcgcctcgcagtacttttgcaagagtggaggtcagcggcgcgacacttttgatcaaacgcgttgccgcgcctgtcttttcgccgtcagccattatggcctcccgctcaagccactcagcaggccccgctgccgttcgacgaggatctcaaaatccaaccagttgcgtcgagaacattgccggtcagattagccggtacttttcaattccttagtcgagaccgaaacaacaagggacataaaaaatgatctctgtcgcggattcgacaaacgggacagagttgtacgcaatcgatttacattttgcttgccaaaggccgacggcaaattcctgcagaggttgagctacctgcgtgagcttgctgccggggacacgccttggcgaaggtggagaatggtgctgttcagaagtagctcagttgaatatccaacaaacgccagtagccttgctgtttcgcggaggaggaggctaggcggagccgttatcccggcgcccgccgggttgcaccccgccgttgcatttctgccactgaggagcagacagtcgggttgaggtccttccgtggtcaagttgtggaccagacagcagaacgctgagacggtgagcagatgaatgcggcgtcggcagcccacaagaggagacgcatccgagcgttgagaggggatggatggttgccggccaagcggtaacacgaaatagcaagcgacggtggggaagaattccgacatggtccatttattgcaattgatagcattgtgaaagcagccttggccattctgcaacttgaactaatcgtcggatccccgctttccgcgactacaaaattgccgcaccttcacgcgctggcatgctcggattctcatagaggctaaaacagcaatggacacggaagcaatcgggctcgcaatagcttttttcgtcattgcactggcgtatgcagcagtcggacaagctggcgcatcaggctacattgccgccatggcgctttctggcttttcgccgttggccattaagccgacagctcttgctttgaacctgatggtctcagcgatcggcacggcccaattcctgaaggtggggcaggtgtcctggcgtaacgtgtatcctttcgcaattctgggctttccggcttcggctctcggtggctcagtgcaccttcccgagagagtctatcacccggttctcgggctgatcctggtagtttccgccattcaaatggcgcgatccgcgcttcgcaagagcgccttggtcataaccattccgaaaacgccgccactacacgctgcattgatcacgggagctgttatcggtttcgtctcgggcacgaccgggagcggaggcggcgtattcctcgcaccagtgatccttttcaagaattggggaacagcacatcagactgctgcaaccacggccgtttataatttaatgaactcaaccgctgccttgattggagcgtgcgcttcctggaatgcacttccaaactttctcccgtggtggttgattgcggtagcggcaggtggatcgataggcgctttaatcggaagccgatatctttccgcttcctggcttcgcgtcattctttccgtgcttctgatggtatcaggcctcaagctgctttggtgatggagtgcccatttgcttgcacggaaaacctttgcccagcatcacgcaggagcacgcgcgaaggcgcaccattctcatccgcggctaagaccgagagggccaattgtcgctgaatgtaatctccgatgaccgaactcctcaccagcacggtacctggaacgtggctggcgcgcttgcgccgaaggtcgagacgtccaattcagcacatcatgacgccgacagccactctgtcgtgtacgatgcccgatatgccaagcgtcccgaaaaccaccttgccgccatcgtcaacctcgtcgccacgaatctgaatggcgcgatctctaaagaacatcgcaaattcgagagcggtcgccgctcataagataaggctcggcgtcacgggtcatcggacagctctctgccaatacggcaggctgtcggcgccatatccaaagtgcggataatcgtgatgcaaaatatttattttactggccttagcaatgctgcaaaaacgaccacgcttgatttgcatcgatattagaacagttccagagtgctggcgttgaaaccgttttgcggctcaaagaaaggattacccgtggaaagcatcatcggttcggcatgtacaagaatccggttgtccataagggtggacaggtttgggcagatgtagccgtcctgtacgttacacttgacctaatcattgcgtgaatgagttttgccggcagttggggcaaccatggccccgtttacgcggcgcccatctagaaggctgcggggagcagtcgctctttctgcccggcagggctcggcatgtgactatttcggagtttctacattgccttcaaatatgagcttaacggcggatctcattgcagatttgctcagcgcggcaaacgaggtcgacaaactcaacccctatgaaataagcggcctcctagaccgctcgattgacaccatccgcgatgtgcgcgaacagactggtgtcgcaagttcatatatgcagggcgttgtggtttgtcttcgaatatcgtcagagcgcgttggccacctctctgaggaggatgtcaggcggtccctcgtcactgccgcggaagtcctgagtgcattggtgtcaaaccgtgtcgattgagctgttcgcgccgccggagtccggaccactccagctatcttcgatcccgcaaaccgatgcggcgaattcggctgcaatctcgacaggtattgccgaagattgcttcagtcgacgctgcttattggaaccggcgtatccgattcgcgacgatgtcgaatacacgacataggcgtgtcgagaggcagcttcttgtttggaaacgatttctcgttggcatgatacatgcaggctaacccgcaaatgcccgagttgaggacttgtgaggaggatgcaggactaacccgcaagagtgcagttcggggtgcgtcagccttccccgggcaacgaggatccgaacagcaagggggcggcaaataggaaagcaacggccgcgagggcgtttaacagtgggtgctgtgcgaggatcagtcccttgcaatggcttgccgccgataacgttgtagaaaaatagacaaggagtgctcaatggtcttcactggaaaatgtgatctgcggagtccgctgctcggacgacgcctgcgcttaggattcatcggcggcggaaagggggggcttgttggacgatggcatttcgctggggcccggctgtcgaaccactgggaaattgttgcgggagctctttcttcggacccggaaaacgcgcacgcttcggctgcagagtggatgatagcgccggaccggtcgtacagcgactggaacgctatggcaacagcagaagccgcaagggacgatggtatagaggcagtctcgatcgtgacgccaaactggacacaccatcggatcgcgacggcatttctgaaggccggcattgatgtaatactagacaagcctatgaccacaacagtttccgacgcccgagaactcgtggagttacaaagagcgacggatcgcctggtcatcatgacttacccgtatgcacatcacgcgatggttcgccaagctaagcacatgatccgaaatggggccgtcggcacggtccggcaggcccatgtggagtatgttcaggagtgggcgacagcgcccttctcgtccgacgcgaagggggcaatgtggcggcaagatcccgagaaggtgggccgcgcgtcggccaccggagatatcggcacgcacgcttatcatctccttcacacactgaccggacaggacattgccaggctcagggctgagtttcacacctgtggcgctgtgaaggcgatggaagacaccgcctacgtcactttccgtctcgagaatggtgcacctgggatcctttgggtaacgcaagctgctcctggccaatattgcggtcttcgaattcgcgtgtggggcgacagaggcgggcttgagtgggatcaggaaaaacctgaagcgctgcgctatgttcctttaggggagcaggagcagatttttgtgcgaggccacggtagtggaatagtacccgaagcagaacgcctgatacatctaccgcggggacatggcgaagctttagtggatgcatgggcaaatctctatgccgaggctggcgtggcggtagccgcacgccgcgcagggtatgctctcccgaaagatagcgtcgagctttccggggttgaggacgggctcaaaggtatgttgttcatcgatgcttgtgccgacagccacgaatctggcggatcttgggtttcgataaacggtgaatccattcccaacttttgctgagctgtggagtgcggcccttggggtggacagaccggatgacgaattgaccggcctaccgggttttcggaaagaaggcccatggcaaaacaccgaagtcacagcgtcgagttcaaacgtcaggtcgcgcaggaattcctggctgagcggccaaagttcgggcgcccgatgtttggctgaagcgtctttgagcactgctagtctttcgcccgatcacgatgctttcggctccgattgtccggaaggcgcgccagataaggggtatccgtccgagcgcgaccgcctttgcatattgagtaaaactgttcagaccctgtccttattcccatgcataaggacagttgccaacatggagatttttgaaggagacagcgggtctcgggtgagccgtcttgaggtgatcaacaccggacggcggcgtcgatttacggaagatgagaagctgcggattgtcgcagaaagctttgccgggagaggccgtgcgtcggccacggcccgtcagtacggcatcagtcgctccctgttgaaccgttggcgcaaatcggttcgccagggtttgcacggccagaaacaaaccgatggttttgtgccggcgttcgtcatgccggaaacttttgtgccggtgaagcaggtcactccacctgctgcgatggagcagccggtggcgtctccttccggccgcatggagattgttgcggcgaacggccgtcgtgtggtcgtggacggcagcgtcgacgttgaggcgctgctgcggatcatgcgggggctggagacgttgcggtgatcatgcttccttccggtcaaaatgtgcgggtgtggattgcaacgggccatacggacatgcggtgtgggtttccatcgcttgcgttgcgggtgcaggaggtgctgaaactgaaccctttggacggcaatctttttgtgtttcgcggtcgcagcggatcgctgctaaaagtgatctggagtgacggccaggggagctgcctttttacaaaaagattggaccgtggccggttcgtctggccttctgccgaaggcggagcgatagcgatatcacccgcgcagctcagttatcttctgtccggaatcgactggaggcatcctcaggaaacctggcggccgacgaaggtcggctagcattattctattgaaaatacaggggaaatctgatcgaatggcttcatgatctcaaagcctgtcgatcttcctgtggatgttgttggcgcttacctggcgctgcgtggcgagcatgaagccttgcaggctaaacacgctatcgcagtagcggaagccgccaatgcgcaggcgatgctctctgacaacgaggcgctgatcgttgctctggaattgaagatcgagaagctcaggcgcgagttgcggggccagcgctctgagcgcacggcgcgcctgctcgaccagttggaactgcagctcgaggaactcgtggcggcggcgacggaggatgaggtcgcggcacaagcagcaagcgccagaacctcgagcgtacgttcgttcacgcgcaaacggccggtgcgcaaaccatggccggacgatatcgagcgcgaacgtgttgtcatcgagccgccgacgacttgcacctgctgtggtggttcgcgcctgtcgaagctgggcgaggacgtcaccgagacgctggaagagatcccacgccggttcaaagtgatcgagacggtgcgggaaaagttcacctgccgcgactgtgaggcgatcagtcagacgcccgcacccttccatgccacgccgcgcggctttatcgggccgaacctgctggcgacgatcctgttcgacaagttcggcatgcacagcccgctcaaccggcagagtgcccggttcaaatgcgaggggatcgatctttcgacctcgacgctggccgaccaggtcgggtacgcaacagccgctctcatgcctgtcttcgatctgatcgaggcgcatgtcttcgcggccgagcgtcttcacggtgatgacaccaccattcccattcaggccagggacaaatgcacgaccggacgcatatggacttacgtatgcgatgaccggccattcgggggaacggcgccgccagccgcaatctattatgcgtcgagtgaccggcgcggcgaacatccgcagaaacacctggccggatacggcggcattctgcagagcgattgctacaatggcttcgagccgatcgctgttgccgcaacgaaagcggtcccgatcacattcgccttttgtcacgcgcatgcgcggcggaaattctttgagctggccgatatccagaagaatgcgcgggatcgcaaacggaggggcaagccgatctcgccgatcgcattggaagccgtcaagcgctacgacgaattgttcgagatcgagcgccagatcaacggattgagcgccgaagaacgactggctgtgcggcaggagaagagcaagccactgttcgatgacatgcacgagtggttgacgaaggaacgcgccatgctcagcagatcgtccgaggtcatcgagccgatcgattacatgctcaagcgctgggagggctttgctctcttcctcaaagacgggagagtttgtttaacgaacaacgcagccgagcgggcgctgagaagtgtcgcattgggaagacggaactggaccttcgccggttctcagcgcggggccgatcgtgccgctgtcatgctgaccgtcatcaccacctgccgcctcaacgatatcgacccgaaggcatggcttgcagacgtgctggctcgcatcgccgaccatcctgtcacgcgcctgtacgaactgctgccctgggagtggaaacgtgcatcggcggcaaccgtcatgctggcggcctgacgatggtggcttccgtcgtccgcctgaaggtcaccctcgatcatgtcgagccgatagtgatgcggcgcgttgtcgtgccgttcaccatcaggctcagtcggctgcacgaggtgttgcaggcggcgatgggctggaccaacagccacctttacgaattccgcatgcgtgacgtcggctttggtttgcctgacgaggaatggggggatggtccgatcgatgcccgcagggtctcgctgctgtcggcagtccaggacaccggtgcgaaatcgttcaaatacctttacgactttggcgacggctgggaacacagcatcaagatcgagcgcacctttcctgcggtcggcacggaaggaccgatgcttctcgaagcaacggggcactgcccgcccgaagacgttggtggtccatggggttatcaggagttctgcgaggcgcttgcagacccggcgcacgagcgacatgccgaaaccctcgaatggtgcggcagcagcgattatgattccgccgccgccaacttctcgcagctcaacaaagccgtcgatgacctcgctgcaaaatgggcccgaaaagcgcgccgcaaaacctgaacgccgggctgtggccgaaggccgaaagttgattttaccgtgtaaacaaccggcggaacagttcttccgagcgccgtagaccttcgtccgtcagcaccagcgacttcgacttgttcaccggatcacagatcagtcccctctcatgcaaccggtccgtcgtcgcccagtcaaatcccttccaggcgcaacgctcgttgtggagcgtcagccataacagtgccagcaccgcgtcatcgattttgtcctcgtcgatctccattctgctatcctaccacgcgcgagacccccaagtcccgcggcccacctcggatggatacgataagggcactcgtctccatagacctcttcgctgtttcgccggggaaacgggatcgggcgagcggatcctgctcctgcgccggtgattggcaacctcggctctgtctagagcgggatgattttagatccgtcattggagtgcgccccttggggtggacaatggtcaggctgctgatttgccagtctgccggatgtgttgatcctcgaactgttggtgaatgcctgcgcacggcagcgctcgatcagccatgcccgatgctcaccggcgatcgcccgcggcttgtgcccgcccatctggccggcggcggcgctgcccgtctcacgccagcgccgttgatcgaaagtcattgtcgatgccgcctcggttgcggtggcccgccgccaccgacgcgccaagaccgatcggctcgatggcgaggtactggtccgcaccctgatggcctggaagcggggagaaccgcgcgtttgttcgatggtcagggtgccgacgccggaggacgaggatcgtcgccggattggccgggagcgcaaggcgcgggtcgccgaacgggttgtccatgtcaaccgcatcaagggcctcctcgtcagccagggcatgcgggactacgagccgttgcgccgtgatcggcgtgatcgccgggacgaacttcgcaccggcgatggccgtgctccctgcatgaaggcccagatcggccgggagctcgaccgtctcgaattgctgctcgaaccgatcaaggtggtggaggccgagcgggacgcgctgttggccgtaccggcggcgaatacccggcgccggtgacggcgatgttgctggacctcaaagggatcggtccggagttcgcggccgttctccgtgcggaaggcctgttccggcattccggcaaccggagacaggttgccgcttatgcggggctggcgccgtccccatggcgcagcggatcgatcgatcgcgaggaaggtgtctcaaaggcaggcaatccgcggctgcgaacaacgatgatccaactcgcttggttgtggttgcgccatcagccggcatcgaatctcccccgctggttccaggaacgggtcgcgcgcaatgacggtcgcctgcggaagtcggcgatcgtcgcgcttgcccgcaagctgctggtcgcgctgtggaaatatgcgaccgccggcgttgtcattgagggggcggtcatgaaaccagcgtgacgacacatcccaatgccgattccgcctaaatcatcccgctctaagagttcaagccgtctccgcgagctcgatatacatcatgccttccgtccataagcatgggcggacgttgctcgattcgaactttcaagtctgccaaagcgccgggaaggatgagacccttcggagtagcatcatctgccgtgacaaaaactgggtcaagcaccggacgacagcatttgaaatgaacggcagcgtcctcgatttttatcgagggggaaaaatgaggttcgcttccatcacctcggataagaacgatcttcccaccaagaggctgagggtaggaggcaaaaacagtgaaggctgttatcccatcccgcagtccttcgtcatctaagaatagtgcatgcgagtcatcaaagcggatcatctgcaccagtcggcaaccgagcagactaaagattggcgcaagtccggtgccgtcggcaacctcgacggtgcgaaagagtgtcgtctccgggtctaagaggtatgcgacattcttcatgtcccagcctttctcattgtcataaatggcgtgacccaacaaaaggcatccgtcacaggatcaaacagcggcgtgaagcgcacatcgggtggtgtttcgctatgcagcatttgccaagattgggaaaatcgattttctgtatggggcctatccacaccatggaatgtgggacggattgcgttcaagcacatcagtgtattgcgcttttggttttaattcacgagtgactgcgtgtgccggtccagtcggacaatgattccgaaacgaagcgggccacccatttcgatttcattccggtgattccgacgcgaagccggacagtattggtgagccctgggtcgttgcgatatgcgcagttggtgttgcgcaatgattcgtctgctgacatcactgagctcaacgcgggaggcattgcgaagccaggctgcaacgccatagccgagcttcttgccacgatggcagatgacaagcaccgattgacggtagaccggatcattgcaatcatcgcacgcgaaggcgcttctgctcgcacagtggatgggagcgagcggtccgtcaagcgcgcggatgacttggccgatcatgatctcggaggccggcttcgagaggcgaatacccgccatgtggacccttcttcgaacgcagagtacattgcgaagctccaggaggatcgtgtcgaggaacttcttcggaattttgttgcgcatggcgatttccgtcacgaacgtcgttcctggcaggaggcggacttttcccgtctgggtgccgatcagacgctcgatatcaccgccgaagcggggctcaccccggcggtcgccatttgattgctgaccgtaggccgccgcgtcaagaaggtcgacgccggaggcgcgagccggggcgttgaacgccctctcgcggtacacccgaagtctctaatcgggaatcaacttgcggcatggtacggtagtcatcgagatccgcctccttcagcaagttccaataatcgaccagacgccaagggctgtttgtcacgattcggcctcggtcgttgcggaaaaaggtggacataccctcatggctccagatcatctgctggtgcatttgttggattttccggttgtaatgttgatatatatcttgccggcattctacttcgacaagtctcttctcgcccatctggcgcagaacacttagtacataatcgatttggctctcgatcgtgaagatgaagctgccgcgatggccgagcgccgtattgggaccatagagcatgaagaaatttgggaaccccgccacaacggtgccaagataagcctgacagtcatcatcgtcccagacgtcgcgtaccgtccgaccattgcgtccgattacctcaaccggaagtagatatcgtgtcgtatcgtagcctgaggcgacgataataaggtctgcctcatgcgtttcatcatcaatcgcatggatcgacctgccctcaacacgcgcagcagctccgtctaccagcgtaacatgcggctttagtagggttctgtaccagccgttgtccaggagcatccgcttgccgaatggagggtacgacgggatgaccttggcgataagatcagggcgccccgccagctgtccctcgatgtattgtgtgtaagcctcgcggtcgcggtcgttaaccgcattcacggaacggtccggatgcggccaggccggatccttctgcagggcctcatgcacttcactgtcgtaaatccaactcaggcggagcctgtacagccattcatagtgtggcacctcgcggaacaagaactgcatcggttccgggaccggtttttgaaatttcgggaagggcgccacccattgacgtgagcgttggaagattgtcaacgcacccacccgatctgcgatggcgggaacaacctgcattgccgaagcgccattgccaatcacggccacacgtttaccgtcgagcgcgacttctggatcccatttcgaggtgtgcaccaccgggccgtcgaagttgcgcaggcccgaaaggttgggccatttcggcgtggtgaagccccccacggccgagaggaccacattggtcacgagggtttcctccgtgccgttgggcaggcgtaaccgggagtgccaagttaggctctcttcgtcatagcgggtgaccaggcactccgtgccgtagcggatggaactctcgatcccaaagtcgcgggcaacacggttgaaatagtcgtcgatttccttttgcaacgggaagaacgtgctccagttgccactggcaaaagtgtacgagtagagatgccccggcgtgtccactccacagccaggatagtgatgtgcgtgccagaccccgccggtgctgtcttgcttttcgacctggatgtaggaaatgcccaattgtcttaaccgaattgccgctgcgacaccggacatgcccgccccgatgatgagtacacgaaatcctttcggcaaggacacggggtccggaatggcgcctgcatatctccgtagcttatgaagcatcatgtcagcgtattctggcgggataggctcggcctccgacacagtcagcatgcggatcaactcttcttccgacaggtcctgcttggtgactggtgcgccgctgtgccaacagatgatggcgtccagtgctgcattacgaatctccgtctgtaattcggccgcgaggccccctgaatcgttgtcgccccagacactctttacgggaagaaacggtggggtgagccagtattcttttcccgtgaactgatacagaaggagtaatagggttggaacattggccgaagggagtgcctcggcgatgcggtggcggaacagggcgaggtccgaagagtgagccatgatttaagttcctcctgttgcatatatccactcccccgccagacgctaagtttactgcctcggcttcggcgtggttgcggcaatcggcattagggaagatccgacaagcaagctgccgaatgtctgatccaaatcgcgcttgataaagcgagtcgaaggtcgccacggcggggaggttctcgggcgccgtcgtgccgccggccccggctcgactgcgaaatatgcccctgtgctgcctcggctcgaccaggcgcgcgcagccggttacgtctgcatctgaaacgatccaccccttgatgatcggaaggcgggctcggcagaaaccattggctaacatgtcgaaatctctgcgcgataaggtgggtccgtgacgtgtcctgcaaatgcctagaagcaatatgcgtgccaaaagcaagaactcttcttaatgcaacgaaatgactcaagcagcggtctcgcgtgtccaacattgtcgtacatcggacgagcctcaacctgacattaattgtaacactgtatgtctgtcttcgtggccgagtggctcgtcctacactgcacttccgaggttgctcggatgagccgacccaatcctaatcataggaggacgagccgtggcagattatcggctacgccgcatcagcgtctggttgccgatgcttggacgtcagatgtagcccgctcccgtccgcaggaaatctacgccgggctagatcctgtcctgctatttgcgcgatgtccgcaccgtgcaggagcggctcgctgcgcttgccgacactccgccggccatgcgctctgacggggtagctcagccgatcgaccttttcctggcgagcttgcggacggcctggaaggacggagctacccggccgacggatcgtccgattgtaaaagccaaaagaggacggcggcgtcctgaccctctcgtcaaggcgaccgccgacttgcgaagttggttcgaagccgaaccatggcgaaccggcagcgaatttctgtcacgcctgcaggccgagtatcccggcgattaccccgacaagctgcttcgaacacttcagcgccggctgaaggtctggcgcagcgaacaggcggacgcgttgctgtttggcaccttgaacaaggagctgccggcccagcagatcgcaaggccacactgaggcgacgccgtggcgctcgcgaaggaggccaggcgctgcgaaacccctaccatcttcgcgcccggcctccttcgccccaacgcgggaacaaaatgaatgaggcaacgtgcgaatctcgggaagcatcgttacgtgcggcaatacggatgtaccagattgtcgctccaccgcggctgcatgtcggttacaactgggccagcggccagggcgcggggcgggaagctgctacgcctcaattccgaccgggcgagatcttcggccgatcgggcctgcgcgccccgcgatctgcggccggtgctccaccaaggcgcagaggtcatcgtggagcaccggctggaactcgctgcgcctgttgcatcccgagggcgccgccatcgacctcttttccgcacttggctcaggcggagcaggaaggcgaagtcagcgtgcgcatcgacgaaggcgaggcgccgctgagccgctggtcccagagtctcttgacatcactcctggtcactttctgttttgtttaattcaccttctgcaacacgtgaatggctgagccggcgtcgtctgagagcacatctattggcacaaaacccgctcggtgtgcacattttttgaaaaacgactcagagaaacaaaaagagttcttcagatgcagtcgctcgccacttaataggatgatatccttgccgccaatgcaaaagtccaggttctttttgaccaccgctgtatgtatgacttgcatgaattggtctccgcctataacatccggctcatactcaaatgcctctggatcgaaattgccgtcgaccggcagctctgccttcattctatagaacacatttagctgaaattcaggatgcgcttcatagtaggacttcgcgacatccctcctcaaatctgagccaattgaaatcgcaacccagcacctcttcgcactattcgatatcttcttcagcgtctcgacgaccgcttccatggggtgcgtatcatttgttgggacagcaagatttccaaatgtccggccaaacatgacaataaatgccgcttcatcgtcgcaaaaatagcgtcgtccagagaatatatcgccgcgtatgaactcgattttcaaccctaaagcggatgacaattgtgctatgtccccgaggaattctcttgaccggtcgacgagcgtgcaacgtgaggtttcgcctcgcagacctataacaagcggaagcgttttctgttggaaggctcgcactgttccaggcccatactccagaaccgaaattcctttacgacatcgttcgtcctggtgatgccattgaacataatctctgactctcccgtgaagtttttgggctaacttgagttcagcatccaccatattggttgtgccagtgacgagcgcactactgatcctctgggcttcagccttagcccataacaacgcgccactcattggattgccattccggtcgactccagtgtggtgagcgtattgttcagcacctaagtcaggcgcatacttttgccgaaacagctgcaaacttgtttcaagaaagctcaagcttatcgcctctcgattctttaacggctcgtcggatccccagttgacgcacttaccgccgcaaacgaagatggtgcgcgtagtccatgagtctgttcatggggtgttcactgaacccataggagaggctacagggttggaaggagtaatccttgacgtggatcaaagacaaacccgaatctgggaggggcttgaacaaatgacgctggaaggggcgccctgtcgatcactacacgatctttcgctgggctagaaatacgcgccggagatcgaaaagcggctgggttggcaccggcgtcggctgcagtcgacaagttggcgcgtgtgaaagtccgtggtcaatggacatacctttaccgcgccgtcgataaaattggcagcacgatcgactttttatctgtccccggcgagccgtcgatctgaatgagttcgccgaagcaatcgcgccggccgcgcggctggaaaacccgcttcttgcgttcgcgtcgcaacgcccagatgccggcttccataatccactgacgcagcgtctccttgctgacggcaagccggtggcgttcgatcagcttctcggccgccagcgtcggtccgaaatccaggtaatgctcacgcaccaggtcgagcaccaggttgcggaattcctcgctgtggggctatatttccggaaggccgccagccaagtaatgaaatgcaacgcgcttgttcagccgagccgcgcaatcttcatggagcgagtttatccgataccatttagcgttgattgtagacgcaaagttgctaatctcgcgttcaaatggaaggggcttttatgaaaactatggttgcaatgcttcttgcagcggttggcgttgcagtcagtgccagcagcactttggcggttaatttctgccagtccaacaaagaccggaattgctttaccggcagtttcggacttgtcgacattcccggtgacgcaagccataagctgctcaaggcagatttcggatatgtcgatttgaacggagtgggttggcagaccaacaaggagacgaagactgacggcgcttcgattccgccgctattgcaaccgtttgtcggttccccatgggaagacggctatattcgtgcagccgtcatccatgactggtactgcgacagacacgttcgaacttggaaagagacgcatcgcgtcttctatgacaccatgctggccagcggcttggagaaaccgaaagcgaaattgctgttctacgccgtctatgcctttggtccacgctggggctatctcgttcccggagagaagtgtgcggctgggaagaactgcatccagatgacaggaaaggacgccgcgttcgtgcagttgcctggggaattggccgatcagtcgagcgcaggcgaattgaaggcgatcaaggcgaccatcgatctcaaggagcgttctggtgatgcgttaacgcttgatgaacttatggcgatcgccgacgaagctcaccccaagcaaacacttcgtgatcagcggcctgccggtggtgatgagatcaccaagtaacggtgcaagtcgtcgatggaggacgcgaggaagagggaccgtctttcaagaccgacagcactatacgatcttgagaagcagattcatcgcttcaaccggcggccaagttaggcttcgtcaactagcggaaagtctcagttggctgctgaagttcgcagcgcacgagtctttgctatttccgatctacgacaggctttgcgaataatcgcgcagggctccgaccttgcagtaatgtggcaaggaaggagggacggcgtgaaaccagggtgtagagcgaaggctcgtcggtccgggtccacggcgcaagccacacctggcagttcgcacccgcggcgccggcgagggtactgagaatttctcggaccagagaggtatcaagtttggtggtgcgggcgatgcctgcttctgtgcgcaagtcgaaagcgggatcgagaagagccgcgaggacggcgcgcacaaagtccggccgtaagtcggccgccgggagaggccagccttcgatctggtcgcgcatcaccagctcctgcaggagtgtcaggcggatatagtcgacgatcctattcctgccgacgagcagcaggaagttcagcccgagcttcatgcgagcgctcgtcgtctcggtgctgacaagacgccgcgcgacggcgaccagtcgcgcctcgatgcgtttgaccagcaatgcgaaggcgttttcgtctattcgcgcccagcgaggatagggcacctccggcagggcatcgccgacgaggggaatgatcggtacatagtcatgcatgctgccgtccgaaagggtcttgctgatcaccgcgtttcgccgttcggctgcgccctccggccagtgtagcgtctgatggttcttgtcgatggtgagatggcgcatcaagaaatattggcagttacggcggccgagctggtagtcgtggtcgcggaacgcctccaggacgaaaccgccgaagccgccgagcaaaccgcttgcgatcgagaaggtctcctcccgctcctcgccgccgggcgtactaggcggcacgcggtgtggcgagatcatgaaccggctgtgggtgccttcggcggcgacggcgagcaactgatcaggcttgaagcgtacctgctggcggagcgccgtcaccacgcgcctggcaatgctgagcaccccgagcggcggttcgccatcgccgagaaaaggtggcccctcgggaaagggcgcgatcatgataacggctcgatcggccttttcggcgttccgttcattgggccggggcgggtccttcatcagggtgaagcggacaaattcgaacgggtcgttgttgatgaggccaccatcgacagagacgaacgaaaagggatagtcttgcgacgccgagacatgccacgcgtccggccacgtgggtattggtctgagctctgattgatcctcggaaatcggaaacttcgcctttgcatattgcgaggtggccgtcgctatcacgcgcggtgaaaggccaatcgggaaggcgccggaggcgagggcggcattggcgaaggcaagccattccggcgggcgcgtcgacgcgcccgccgcgccgaacagtgacgtggccgcgatcgacgtgcccgaatctgtgtcggcgaaggggctgggggtcggcttccacgtgccgatgccctcgaccacgtagtgcacgcggtcggcgtgcgtcatcatgttgtattggccgccgttgaagtgaatcgcgtaaggcacgccgcgcaagttcgacagcatcatgtagagatggagcgaactggcgacataggcgcgtgggctgagggtacccgtcgcctccaacgcctcagccccaatcgcggtcaacacgttggcgttgagaaccgagatgaccggccgcccgcccgccaggtcttcgagcgacagcaggtcgggtgagccgtcgggggaaaccagcgtcgggctggtcacccaggaccggtaaagacgtccgagagtgaagcggatgttctggctgccgggggcgggacttgggaaggtcgcgggagcctcgcggccgccggcggcgatcacgccaatggcggcggtgatcgcgccagcagaggccccggagagcgccttcaggcgaacgtcgtactccggcaagtcgggagcaccttccgccttcgccttttcccatgcgtcgagtgcctggatcagaaagtcgaagacgccggccgaataggctcccgccgaaatcgcacccgacatcgcaatgccgatttcgaacgtaggtttagagccgtcggtcatcactgttccctcagttgagcggcgccgcattgatccctgcgggcgccatgacgttcgtgcgcggctgccgccggctgcttacaatgtcttcaggtatgcaatgagcgccgccttctcatccggcttcaacgccgggcctatgacgcccgggccgggggtgtcgctgaattcgtgaccggcattgctgttgcccggctttgcggtgtcgaacttgaagccacccttcaattcgtccgttagatagccaagcttgtccgggtcgtattcgcgattgccgagccagaacgtcttcggccgttcgccggccggggaaagcagggcatcgatggtcggcaccgagccgttgtgcaggaagggcggcgtcgcccagatgccgtcgagcggccgtgccttgtaggcaagcggcgcctggatgccgttctggcgattgccattcatgatctcccgttgctcggccggcaccggcggggtctggttgtcgtaccagcgagcggctgtctttgcgacgagcgcgccgagcgcgctgccgaacgagtcggtgtcgatgccgagctcggagggaagcttgaccttgcgctccgccatgctttgggcctgggccggatccgtgccgatattctcgacgttgatgatgggcacgcggagatagcgctcgccggccgaattctcgttcgtccagtgcttctgctcccaaaagccctcactgccgaccggtggcaggtggcagccctggcaccggtcggcgtaaactgcggcgccctcggttgcgagtttggtatcgatcgaaccgaacaggttggaaggccaacgcgggggacgcaggccggtgaagccgttctctgccgtcggttgcttgccggccaactgctgctcgatctcgaaaatcgtgtcgaccttcaccgtcgaggcaaagagtggctgctccgacttggtgagattgatgaaggcgcggacccccaacgcttcgcccgcattgcgcaccatcggctgcatgatcgaggcattgtattggacccaatcgaaccaggacgtgtcccagatatgtgggaaagcgactggcgcggattgagcgacgtagttctccggccgctcaaggtcgagcgagaagacctggttgccgatccggttgagtgcatccaaccggccgaacccctcttcgatacttttttcggccaccttcttgtcgagatcgacttcgatcctgccacccgcaagcaccttgtcgagctgtttcttgagcacggccctggctttctcatccgcctgcggcccgagcactgccgtggcgaagcggtcgaaacggaaaggcgcatagcgggtgaagaacaaggccaatcctgaagccttgcggaattttccaagatcggtgagtgccgggccgccatcgaccatcacggcagtacccttgtaagtgaagcgaccggtgtggcatgccgcacaggtgagcccgacggtggtgagcggcttgccggtcgccggattgacccacggttgggcggttttgggatcgacaagatcgccgccatgggcaaagccgaccggaaggccggatgaatccgccgtaatgaagccgaagcggtcgagataatcgctggacaggaagggcggcccggctgtcagcgtgaaggtgggctgctccaacgccgccagccattcgtagggcatcgagaaggtcaccgtgccctggtcggcatggtgcatccaaccgcgttgtgattgtgaccagttctgctcgagccaggtgaccttgtccaccttcggatagtcaggaagatcgacgctaaacatccggaccacataatagaggccggctgcgaccagcacggtgaacccgagcaggataggccaaaatcgcgacttgcgtttcatgcgtctttacccccaaagcttgaaagcgccccttccagtgcggcgtggtcctctaattattctggggcggcggcactgccgcccgcgccgctcgcgcgcccggatagacgattgcgcgtgcgtgaccgagcgatgcgtaatcatctggactggtcgccaaaggaatgcgaatgcattccgggctccggtttggattcatctccagcctgctcacggccgcctggtcgtcgatgacctcgttaaggcgaatttcgaacatgtccacccaggggaaccagtattcgttccacggctgggacgggtcgaacagctcgtgattgccgaccggcggcggcggcgtgtcacgcagctgcgcctgcaggatgtagcgcacgtcactgtgcctgacgcggtgaatgaaatccttgcgcaggaagtcgggagcccgatcgtcgtcagcctcagcgtccatggatggatggccgttagccttgaattcggggcgcggcagaccgcgatcggggccgcggtcggcgttgatcagccggaagcggacgtagcggctgacgccagttttgtcgatgaattcgaaacagacccaggtgtgataccgcgaatccgtgaacgagccgcggatccgatacgcctcgcgtagttgatcatcgagcatcaatccggactcgaccagctttattcgttctgcgtccggcgtgtggacgaaagtcgagaagtcgcggatgctgcgcacgaagagctgccggccggcattcatcagaacgtcatagaatccgtcgccatcggtgctggcacctggctcgaaaaattttatcgaggcggcaaccccatcgcgtgcgcggtcgtcggcgcgaccgcccggcgaggaatggcgcaggatgatcgggaagatacggccaggcacgaacatgtcggtttcagggaaaccggccggcgtgatgcagcgcgcctcgccttttgccacgaccccgtaggtgtgcgtcgcacgcccctgctgaagattggcggcgtcgcctgcagcttggcaagcacggccttgaagtcgtcatttatgccggcggtcagttcctcgggtgaaaggcgcatgttgaagctccagtgttcgttgccggtcggctcgcggcgaacgacctggttggtctcgtgccggaggccggagctgctgagatagacccgccggcggacctcgttgatctcgccaagcggccggtgttcaagcaaggcgtgccacggcgtgaaggagaggttgtccccgaaggcgagctgcgccgccgaggtgaaggtctgcggtggtatggtgatgcgggcgaccgcctcgaccggtgtcgcccattcgacggtcgggttgtcgatggtggttgcacttgtgtcgtcgttgagctggacgcggaagtcgaagaccgccggtcgcgccgcccgggtgaggtgatcggtcatcgcttcgcggagatagccggggccgcgggcctcggagggaatggacgagacaaggttgtcctttgagggaaccacggaatagcgacaggcatgcgcattgcccaatccgtaagcatagggcacctggctccagtagcgtgcagcaagcgggctgtcctgcacctgctggcggaagccgagaagcacgggcaggtcttcgggccggttttccttcaaccatgcgatgaaggcgagcggcggttcaccgcgaggcgccgaccgcgcgaattcggccatgaaccggacatagtcgctggtgtttctgatgaagaacaccggcttgtccgccagcacgaaatcatgggtggcggcgtcctcctcgccttccagtatctttcggccagccaccccggtcagcttgatcgccatgccgtgaatatcaggcttggtgtcgtcgatctgagcgccgttggaaaagcggatataggccgtgtagaccttcggctcggcgaaaagcccgaccctaaggcgctcgggaaggtccgcaagcacctcgaaggtcgcaaaaacgcagccatgctgtttaaagtgctggccacgcaggccggggccggtgccccgcatcagcagccgctgcaactcatcgatttcagcgatcccggcattgacgtcggacgaggcagtttcggtcattgcgccagtgctccaagctatcagtggggtgaacgcgagcccgcgctagcgggtcttcagatattcgatgaggtccttgagggcatcggcatattgcgggccactccagtcgagtcgacggagcttgccatcgaccacgagattgcggtcgtggcccgtgccagcatggccgtcctttcgcctgtcgtagatggtcagcgtcggcgacgtgtcggcaacgaggccggtaacggccggatccaagacatatccgactttcgcagtgtcgtattggatggcgccgcgcaggaattgctccgggcggctcgccggcaccaggagatggtacagcgtcggaatggaaccattgtgcaggtagggcgcgcgcgcccacaccccgtcaagcacctcggcgacatagccctggaccgccggcgtcgtgcgggcggtgatcacgtcctcgcccgccatccggcagggacggacttcctcccccgtcgggctgcgatagaggaaatcctgatcgtggcagcttgcctgaaagccggcggcgaaaaggtgaaacgccgcgtcattgaggacggccgcgcggttcatgtccgtgcctatatcgcggaactggtagattgtgtcgttgtgcggcttgtggcagacggcgcaattgtctttgaatagcgcttcgccgcgcacggcgctcgccatgtcgacatcgaacgggtaggcggccggtggcaggccgtcgaggaaattggcgacaacgccggtattgacgagatcgatcttggaagggtcgccgacgatcggaagctgagcggcgatgttgcgccagaacgccatcttcacgctgccgtcccactgggcgagcgaacgctcctgttggttccacacgctcggaatgtcggtgatggtcgcaaatggtgggatttctggatgcgaactattcttgaatgccgtggcatcgaagttccggttgaggccccccgccgcgttcggctgacattcgccggggggcattgccttggccaccaacaactggaaaatgagatcgccgctgccatcctgctgtccggtgctgaagccggaaaagccaggtccgttccagttgccgtagctggtctgtttttgaagctcgatcccggcttcgcgctgaacggtaccgcaagcgaacgtcgccaaaatgccgggaagattcttttttaaagcggctcgttgagcgacttcgacattcggcgtgaaattcaggaatccaggtttgccgaaataagccggaggatagaaatacccgttcggtttggcatcgatgatggctgcgatgcgctcggccgacgcttggatcttttcaggggtggagaagtaggctgtcaccgttcgcgagtaggcatcccgccacttgcgcacgtccatcttcgtgttcggcgcaccctcgacgaccgccggtccatccggcgtctgtacctgtccaatgtggcccgcaggcaagcgtcacgacatcgagcccgggcttggcgaaatcaatctctcctaacggattgccgccagcatccagggggcggcccgcggtcgaagcgatgccgagcccgagcggcagcggccgcgatttgtcatccggatcaggaaagaagccgaaacgcccgaaattctcatcgtttcgcccccaaatttcgggtgcgagatcgggtaacacgcgctggagcaaatacggtgcgccagtaaagccattgcccgcattcgcgaaccacgacgagccgaccggattttgctctcggtaggcggtccgttcggcatcacacccagcgcgaatctctgtccaactgattgtcatattcgcactcaggtcatctcgcgccgaacaggcggggtttgctgcagccagcccgtggctcccgaggatccagagcgacgcaccgtacgccaccgcaaaaaagtgcaaagcaaaagggagacgttcccgacagtgagacggcattctaacctcggtctttgcttgcaaggagcagatgaattgggcagactttaagaaaggctgtcaggtaatggcgcgcccagatggaaatccccgccgccgttttacacgcataagtattagcatgggctgggaggattgcaagcctcaaaggagaggtcttttgcgtgttctttagcttgacgctgctgctttcctttaggttaccaatgaattaagtaccggacaatttctccacgagcagggcaacaatattcaaggatagatttgtccaggtgtcggccaaaggatgttattataatactaattcgacttaaacgcgatctccgggtcatctgatagatcggaatataatcatggcgcgctggcgccgagttcaccagcaagacgcagagcgccagccacgtcaagccgctccaatccagacgatatcgtcccgcggccccctcatatgatgagttgaaggtcaagagggtgggggcaccattttgcaagcctttctgtcgtcgacggtatccagctgcgcccattcccagtactggcaggccatgcctcacctgtaccacctcatatccggtcgccgctcaagacggctgcaccataatcccgcattcgggggtgggctcaggagaacggaaccattcttttaggcggcgatagaagccatggggggcttcggtccgttcgcctggatccgtcagagctgttcaggctccgagggattggcttggtcaaaaggtgggtggtcaggccttgcccatgacggctccttcgatcacgacaccgctggtcgcatacttccacaaggccacgagcagtttgcgcgccagcgcgacgatcgcaaccttcttgccacgcccgccgctgtggctgatccgttcatagaaccagcgcgtcagggccgagcccggctggtggcgcagccagagccaggccagttggatcatcatcgtccgcagcctcggattgcctgccttcgagacaccttgctcgcgatcgatcgagccgcttcgccacggcgaaggcgcgagacctgcataggctgcaatctggcgccggttgtcgaactggcggaacaatccctcacttgccaggatatttgcgaactctgcgccaatgcccttgatcgccttgagcattgcctggggcgcggtaccatccaccttggcacactgggcatcgcgctcggtctcgacagctttgatctgctcgttcaccaattcgaatcgatcgagctcacgactgagctgcgccttgagatgggcaggcaattgccggccatcccccgtccgtagttcatccaagcgttcacgccggtcgcgacgcgtaggctcataacctcggacgccaacgctgaagagcagtcctttgatccggttgacgtgtcttttgcgctcctcgatcagcgctttgcgctctcgcccgatcctgcgacgatcttcatcgtcaaccgccgggactcggaccatcgaacaaacccgcggttcgctccgcatccacgccatcagcgtgcgaaccaacgtctctccgtcaatgcggtcggtcttcgcccggcggtgccggcgcgacaccgcatcgaggccgcatccacgacatggctcgtgatccagtcttccgcctcgagcgcgcggtggatccagaaaccatcgagccccgcttcttggatgacaatcaggggatagagcctgccctcgcgcgcctctgccttctcgcgcaagaggttcaagcatgccagcaaagcaggcaagtcaccgccgggtaccgaatgacgcgacatcttctcgctgccaggcgatagcggcgtcactagccagatcgacttcgacagttccaatgaaacgaaaactgcgtcaagatcaacccggatagcggcaggtggcgaagctggttctgctgtcatggcaagtcccttcagagtggttggtagcaaaccgactctgatctctcacaggccgctgtccaccgctcatcatggaatctttcgagtgaaactccgctccgggaaagcgccaatccttgagtttgatcccttgctggcaggcggcggtgagcgaacggtccttggcggcctgaaaaccaagaatgtcgacgtcgtggtcactcgagaaggcatcggaccggttcttgccgtttcgtgcaaggtccggaatctgacgaaccgcatggaagagaccatcggtatagcgcggcgatcaggatgagacggcggcgacaatctggatgagactcttatgtcgcggtcggcatgaaggtatcatgttgattgtcgctggcaagggtctcatcgtgttctgattgtcgctccgcgacaatcagggaagcacttttggttgtcgcgaaggcggcgggtctgccgcggtggcgtttggcttccatggcggaacgtcgccgatagctttcgacgttcatttcgaagatcgttgcgtgatgaacaagtcggtccaccgcggcaagcgtcatggccgggtccggaaagacgcggttccattctccgaagggctgattggcggttatcatgatggaacgccgctcatatcttgcggagatgagttcgaacagcacgctggtttcggcctggtccttggtgacgtaggccagatcgtcgaggatgagcagatcgaacttgtcgagctttgcgatggcggattcgagctggagttcacgccgtgcgacctgaagcttctggacgaggtcggtcgtgcgcgtgaacagcacccgccaaccattctcgatcagcgcgaggccgatggcggcggcgagatggctctttccgccgcccggcggaccgaacaggaggatattggcacctttggcgagccaactgtcgccggcggcaatggccatgacctgggccttggagaccatgggcacggcgtcgaaagcgaagctctcgagcgtctttccgggcggcagatgcgcctcggcgaggtgacgttcgatcctgcgatgcgcccgttcagccagttcatgctcggcgatggccgaaaggaaacgagccgcaggccacccttcacgatcggcctgttcggcaaattgcggccacagcgttttgatcgtcggcagcctcaggtcattgagcatgatgccgaggcgggcttcgtcgatggtgttgtggacgtttttcatgcggcctctcccgcataagcagaccccatcagggcttcatagctattgagcgatgcgagctgcacatgcacggtcggcaactgatccgggtccggaccgaagatggctctcaaggccatcaggtcgggcagtttgcgggcgtcgagcgttctggcaagctcctcggccagttcacgctcgcaaccgcgatcatgagccagggccagcaattcgacggtgatcttgcaagcctgccggtcaggcagttgctcgatgagagcgtcgaaagccctgcgatattccggccgggggaagagcttgtcgcgatagaccaggttgagaagcgccatgggctttttgcgcagagagtggatgacgtggtgatagttgacgacctggtcatgcttgccgctcgcgtgggcgcgacctcgtggcaacgtcagcagatgcgtgccgccgatgaagacgtcgagacgatcgtcaaacaaacgcacacgcagccgatggccgatcaaacgggaggggacggtgtagaagactttgcgcaaggcgaagccgccggtgcgcgacacggtgacgactacctcctcgaagtcggtggtgcggcgctcgggaagcacctgcagatgcgggcgctcggcatcaatgcgcttgccatgcgcggcattgcggcggctgacgatctcgtcgatgaaggcgcggtaggagcgcagatcgtcgaagtctctggtgccgcgcatcaggagtgcatcgcggactgcgttcttgagatggccgtgggagctttcgattgagccgttctcgtgggcgacgcccttgttgttgcgcgtcggcgtcatccggtagtgagcgcacagctcctcatagcggtttgtcagatcgaccttggcatcggcatcgaggttgcggaaggcagccgacaggctgtcgctgcggtgatagagcggcgaaccgccgaccgaccacagggcgttctgcaggccctccgccaaggcgacgaagctttcgccgccaaggatgacatgggcgtgctcaaaacccgaccaaaccagccggaagtgatagagcagatggtcgagcggttggccggcgatcgtcacgctgaggctgcccatgtcggtaaaatccgacagccctagtcggccgggctcgtgcgtctggcggaagatcacctcctgtgcttcaccgtgaaccgcccgccatgaccggatgcgccgctcaagtgtgcggcgaatgccttcgggcagttccggatgacgccgcagcatctcgtcgtaaacggcgaccgcacgaatgccgggagcggccttgaggagcggaacgacctccgcatcaaagatatgctcaagcggatcgggtcgacgccgaccgcggggcggcttgttctgcgacggaaggcgctgctctttctccatgcggaacgccgtcgcccggctgatcgacgccttcgcggcggcgacctcaacagaatgcgtttgtcggtacttcatgaataatctcatctgatgatcggttacatggcgacccggcacaaaggtggttctccattccagaaaaccgccaccgtagcgggccgaccgcgatcatgagacgcctaaaaattgcgccgcggcgggggtgtaactccggtcgggctacgccctcccttcgtcacacccccaccgccgagtctcatcctgattgacgctgagtctcaccttgtttgtcgccgcgcaccatcggcgagtgcactaacttgcacatcacctatcccgcactcgtgctgggatatctcgttctccttcgagcaaaccggatgatcgaagcggcactcgatgacgctgcggaagtcgccgaagatgccggcgctgtgagcgggacaaaaacactacgctatgaccgaaggcggcgcaccggtggcaggcatcgttcgcttccacaacgctctgtgtgaactcttcggccggcgaggcatccgtgacaacgtcagccgttacgaggcgattggcttcggtctcgtcgagatgcatggcgaggagcgcaacagcctcctcgaaggtctcccgcaatcggacagtccatttcggctgagtgggttttttgacacgctctacgctcgttacgacgagcgcttcgtcgttagtgcaccgtgagcgtcacgaacgccccaccttttatcggcgtgatttaggcctgagattcggctctttgatttggaagggctgttttgaatggacgagcggaacgatagtgccaggtctgaagccatgtttgaagccaggcacgaagggcggtatcgccgtgttgaggtgatcacggggccagtccgccgacggaactggacggacgaggagaaggctctgatgctcgcggaaagcgctgagccggatgcgaacatctctgccattgcccggcgctttggcgtcaatcgcggccttttgaacacgtggcggcgggcggcaggccaaattggcccggttttgggagagcccgcgctggagcaacccgctttcgttccgatcaggatcgctgacgatcagaatgagcatcaagctgatgaagcaggtatcgccgaaggcgccgccggtcggatcgagatcgagcttggcggtgggcggatgatcgtgacaggcaatgtctctcccgacttggcgcatgctgtggtgatggcgctgcggggtagacggtgatcgggccatcgagggggctgaggatcatggtggcgacccagccggtcgatttccggcgtggcatgaacgggctcgtcgcactggtggggtcggcccttttggccgacccctattgcggcgatattttcgtcttccgggccaagcgttgcgaccggctgcgctgcatttattgggacgggtcaggcatgatcctttcgacgaagtggctggaaagcgggaagttcatcttcccgccggtcaaggatggcgctcttcacatgtcacccgaagagttcagtctgcttgttgcgggcctggactggacacgcgtcaagcgcaagcccgtgaagcgaccaacgaaagtggcttgatctcattgtatttccttgcagattcacgcccgtgtggtagctttcggcatgtctcttcgccacgaacagctcccgcaagatgtcgagcaactgagcaggatggtcctcgatctgagggcggaggtcgcctacctgaagcggctgatccacggcgcaagatcagaggtgctttcgacgatcgatccgacgcagaccagtcttgatctcggcgatctttcgactgttccggtcgccgccaacgacgaccagcctgacggttcccggcagagtgtgcgtggccggcaatccgcagcccgcaatatcggctttcttccgaagcacctgccgcgctacgacgtgattatcgagccggaaagccgcgcgtgcgcctgttgctccggcgcgcttcaccgcattggagagacgacaagcgaagcgctcgatatcgttccggccatcttgcgcgtcaaacgaaccattcgccctcgctatgcctgccgggcatgtgagaatggtgtcatgcaggcgcccgcaccggcgcgcttcatggatggcggcatggcgacgacggcattggccgcccatatcgtcgtctccaagttcgcatggcacttgccactctaccggcaagcccagatcttcgcaggctatggaataaccctcgatcgcggaacgctcggcatctggggcacgcgtgtagcctggtggctgaagcccctctacgacaggctgctggccttcattcgctcgcagccaagggtcttttccgatgagacccgattaccgcggcttgacccggggcgaaagagaacgaaagtctgccagctgtgggcgcaggcggtggacgaccgcccctggaaaggaccggccccgccggcggtcggttacatcttctccgagagccgcagcgcccgtgaggcggaacgccaactggcatccttcaacggcgttcttcaggtggatgggtataccgcctacaagacgcttgccagacatcgcggcaagagcaattccagtcccttgaggctggcgttctgcctggcccacgcccggcgtaaattcgtcgatgtggtcaagttgaccggatcgccggaggcgctggagatcgtatcgatcctcgccgaggtctaccagatcgaacgggagatcagggggcaaagcgccgaggatcgtcagaatgcccgccagctccgctccgctcccgtcatgcgccagttgaaggcgcgcctgctcgacctgaagaacgacatctcaacgcagtccgccctcgccaaagccatcaaatacacgctcgcgcattggacgggcctgaacgctttcctggacgatggaacgatagaggttgactccaacatcgttgagcgttcgatgaagtccgttgccctgacgaggaagaattcgatgttcgtaggcaatgtccagggcggtgagaccttcgcggttctggcctcgttgatcaactcggccaaattgagcgggctggatccgtacgcctggcttgccgatgttctcgaacggatcgtatcgggcagcacgacgatcaaccagctcgagacgctgctgccttggaattggaaagccgatcaggtcggtcaagccgcatgacccggccagccgtttcctatgacgaactcgatgagtaccttcgtggcgatggacacaacgactatgtcggagtgagcgccatcgatgggctgatcgcggccgtcgtggccggcccggtgacgatccttccggatatctggttgccgcacgtattcgggggatcaatgccgcaagccaggccgggctcgatcgaggagcggctcgtcaatacggtgctcaaccgtcacgatgaagtggaaagcctgctgcgcgacgcccccgggcactactatccgatcttcatgaaccacaaaggcaagaccatcgtcggtccttgggcgatcgggttctcccttggactcagtctgggcggcgaggcttgggcgccgattgctggcaatgccaaagccagtgatctcccccatcatggccgtcaatccgcagctggccaaactgctcatccggctttctcctcaggagcggcggaaattgagagcaaccgctcatcatcacatcacatccgcagtcctgcagttgcacgccatcacaagacaggcccgataacaacgcagccaccggcacaaacgcaaccttaccgcaagacggcgtgttcgttgcgcttacagtgcaccagatctgtcgagcacgacacgcaggctcgagggggaccctgcatccccggcgtttcaggtctcaaacttggattacgccccgcggaccgatggtcgggctgccgttgggaacatgtcgtagcttatctcggatctccattatacgagagtacaagcacatgcgcggagggcgccgatcgccaactcctcgtgttgcgtgaggactgatcgggtcaaactcacgaccgcagcgcccaagcgcaaacgtcggtcgggagtagattgaaatattgcaaatctctcactgctgccgtaagccgtctggaggaggggcctgtagctcaatggttagagccgtcggctcataaccgattggttgcaggttcgagtcctgccgggcccaccaaattttttgtgtcgcctcataccgcggcactcgaacatctgcgtcgccccgcgatagacgaccggggctgcctggaaagcagcatatgctccgtcaacgaaacctcccagagatagccacggagcccgaggtctgccgcctggtaagtccaaagggcaactaaaatgcatccctgatcggaaacatgtcttcgccgtagtggtgaagtcgtgtgtgatgccgccggcataaccaccgtaccttcaaaggctcgtcatattggtcgtgatgggcatcgactgtatcgatcccgcagacttcgcacgtttgcttctccagttcgcctgcattcactgcgcgctgcacagcgagatgagcatcatacttccctggattggcacggcgccaattcgcttggcgggtatcggttttcagcattgctgcgctgcccttcgttggcctttgctccggcctgacgaacccttctatcacagtttcgcttcgggcgcgacagcggactgtgcctcgttgacctcaacggcaaactggctaccatccgagtcggcccatcaagttcgccgctcgctccttccggaatggtgaatgcacaaattcatggcttgacccttgtgggcggctcgtcagaaacgcgagcactgacctccattacgccccagagagggaaagaaccattagtgttttcgcacgctcgaaattcatggccaaagccttttgcaaggccctgccgaacaaaatgtcgagctaacggaagctacccacttgccgaacccgtccaaaagcaggaagtggcggaagacggttcttagcacagttggcgtcgagcgcttcgcgtgcgagcagcaatgcatggccgcagcaccgaagccgagatccgcagcatcctctaaagcgattgccatcccccggagcgggtcaaacgggtctttattggcgcctgctgcccttgaagcatggggcttgaccgatgccgaagcggagtatttcaaccagctccgtgacaagactcctgctggaccgaattcgcgtggaacgatcggagacagagaaaaaggccgagcgtgtcatagtggcgccgacattgtcacgcacacaccctgccgccccgtccgcggcaacggcgacgtccgcttctgcttaggtagcggatatgttgctcagcggttcaacgctgttgccgtatttgcgcctataggccgagatgaaatcttcgtcgctacagatgcagcggccgctcgagtctttggctttcgggtcatgtaagtgagatccaaggggccgcagaagattcacgcgagtgcttgtcgttgggctcatgggaaaacccgcactatgtttgaccagctccgcggcgagcatgatcccggcaagcgctgactgaaaggccatcggaaccacggttcgaacgagacgacttccatcgctaagctggaataccagaccgccgcagatagcctgctgatagaaggaacggagaggttggccaacaaacggggcgagcggctcaaaaggcacgcccatcgccgtagccactcgaaccacgaagtcgttgggaacgccggcgttagtctgcaatagcgctttcacctgctcgtgtgtttccggtatcccgagttcctcggcaatcagctgatgctcgtccttggattttccagacggcatgtacatgcaacaaaggcatgcctggccgtcatcgaaaccatgccgcgagatgccgaggtcgtgttcctgcgtccacgcattcgcgatccatcggggcagagcaccttggacagcgagacggtcggcggctgtgtcaagcgccacacccactcgatcgaaaatccagtctccccggcgcgcgacatgttctgcccacttcagcggatgcgcttcgacctctaaagcggtcgatcgaagggcggtggttgcaagaaccgccttggacatgccgatctccgcttggccggccaatacgtagcgctgcaggtttgagagttcgaccgcttcgtggtcgacgacatgcaggcgacccgagaggccggattgtctcgccagagcccaaagcgcgccatggcctatcgcgccgagcccaacgaggtgcgtttcgccaaggtcgacaggaaggtcaaccgggcgagcatcgcgagctttggtcttgttgtagctgtataacgagaggtcaatgtccgggtccaactcggcgccggttaactgggcggcgaagatggttcgaaagacgttggcggcgccgaagcaactggcggcgccagctccataggggagcaaactcgagccagagcccaccgggtccgtacgcgacagctttgccgcccaaccgtccgatccgatgaaaaaggttgtgcaccgcagagatggccgcgtcgcgcctgcaactaggcagaccatggcggacttgccggaacgccgaatgccgatttttggattgatcgactttgccaatcgctccagcgcctgggcttgaaagctcgacgcactgtccaaggggagtattgccagaaccggatacagtctggcaagcaacctcaccgcaagatctagcgtcgcctggccttcggcgcaggaagcggcctgatcgtcgaaggcgacggccacgacctgcttttcaagagccgctttgaagtcgcccagatgaaaatcggtcaggacctgagatgccgccgtcgcggcgcggtcgatgaaattagcaagggccatcgtcaactcgttatcgtgatcattcgcgtcaggaccgcggacgggacctcattccaattcgccttagcgtcaagtcggtaggcggcaacatgagcaaaatcgaaaggctcccgagcgaaattcggcactaccagcgacagacacccaatcgtggtagcgaccgcataggcgtcatcggtcgtcgagtgataggcgcggcccggatgactatggatctgcgccagaagcgtcaggccacgtttgtagagccagacattgagccggtgcagttcttcggcagggaccatcacacagacgccatcacttgttcggatgtggcgctgcgccgggatcactgtctccgctatgacaaaatgctggtcttgctggacgccgacccagagtgccatcccttcatggccctgctgtccaaccgaccgcagatgcgcctgtactgtggacacgcagtctcgggggagggcgactgtcctgacatcctctaacgcgctcattctggaatggcctgaggtggtactagcagtcctcccaacgcgacctgaaggtgaatctgcagttgctccgcagggccggtcccgtatttgatgatcttgtccaggatgaaggccaaacagccttcgccagaaccccgatgaagtagccatgggtcacctgagtgcgctggattatcgtggtattcccggactccagccatgcataggaatggttggtcctcgagactgttggcttgaatgaaatcggtcaatgataccgcgttctgctggataagatttgaaatcatttccgtcggggttccgggcagttgcggacgccttaacatattcaggggaaggtccttccgggcaatcggctgacgtgtaaacggatcgacgaagaccacagacagtggtctgagatcgtagttggtgaagtcgatctcgatggccgcgccgataacgcgcggctttacctttgggctcgcaaatatgaagaaagcgctcgggaagctctcctcgatcagaaagcagccttgcatcctataggcatctgcatatgcgcggaaccggctgatctcccgatcaaacttcgctcgagagaccttcgggtccacagtttggagttcaggcacctgcgacacccgccttcaagctgaggaacagggttccagtgttggcgaatccgaaatcaccgattttcttgtcggcgtcgagcagcgtgccggcctcgtccttgaactcccagttctcggcaggttgggccacgttttgcgtgttctcaagggctttggtgcgaacgacgtgtagcggctggttgggattggcttcgacctgcgtaggctggccgttcaccacgacgatgatttcgatcttcccggggccgcctccgtgattatcgcccttacccgcttccttcgacattgtcatactccagtggcttgccaaccggccccaaggcactactgccgacctgccggtgagcgggctggcggtctttgatcgtccactcggcgccacgaaccgcgagcacgtgaaagacaggggataagctaccgaatcggtgctagggcttttttacgcggtacttgagaggcaagtaaacctctggaaaactgctgatcacaactataatcgattagagcagctaaagtattggcgaaatcttccatgagatattgcggtatgatagcgctggatatataatgctatctttgatatcttcattgaagggaagccatcatggcaaatgtgaccgttaggaacctacccgacgaggtgcaccgagcgctacgcgtacgagcagcaatgcatggccgcagcaccgaagccgagatccgcgacatcctagaaacgactgtccggcccccggagcgggtcaaactcggctctttattggcgtctattgcccatgaagctggagggctgacggatgccgaagcggagcatttcaaccagctccgtgacaagactcctgctgaaccgatgagcttcgaatgatcgtgctcgacaccaacgtcatatccgaattgtggaaggccgagccggaccgcgctgtgttggcctggatcgatgcgcagatgattgaaacactgtatttgtccgcgattacggtggccgaactgcgtttcggcttggcggccatgccggcaggcaagcgacgcacgatctttcagaatcgcttggaaggagaggtcttgccggccctcgcagggcgcgttcttcccttcgacttggacgcgtcgcgaagttatgcggacctgatggcgcaagcgaaaacgtcaggcaaggtcatcggcaaggcggatggctatatcgccgcaacggcggttgcgcatggctttatggttgctacgcgcgataccagtccgttcgaggcagctggactagacatcatcaacccctgggagccggcatgatcccgccgatctcatttctctatgcggtatgttaaaccataatgtggcggccaggttgaactgtccgccgttgggcaaagttaaaatgtcactttggatacgtcttcagccatttagaaatacgacactcggcatgtccacttgcgctgaggcaagcccccgaccgggccggctgggccgggttgcaagggaagggagggggcgggtgaagggcaccccttcggctttagctttctcggtttcaattattgcgttcctggtagatgttgcaggcagctgaatgtgcagggccaggatctcgcgatgcttccggaaatcaggctgatgggtgacgtcgatgtagccgcgctgtcgccactgtttcgtggcatggtcatgactgtttcctacgccgagacccaaggagggatcggtctgaccgcgtcgggggcgatgaaccgcaagttcgtccactgggccgctgttcacttcgattggcccggccacacgtcggacgacttgtacagcgtcagcaaggttctgaacgaagccgatatgccgccgcttttggtcgtccgcgacatgctcaagcacttgcggcttcttcggcggcgaaaggacgtactggtaccaacccaacgcggccgagactttctggtgagaccgcaggccttcttcgatctgatcgcgacggattatctttatgcttatatccactacgggcagacgcgggaggctgtccgcaatcggatgcgttggtggcacgtctttctcaatcttatcaacatgaaagcagaaacgggctgttcgttggacgacctggcgaacgagctatacccgagcgaatcgtacccggagccagcagaaatgactgtcgaaacctgggcggaaaggtcggcgctccgctacgattcattcgcccgctgtgctggttgggattgctgcacgaagagcgcgaggggctgaccatttggcagggcggaacctaccacaagacacccttgtgggctgcctgtttaaagctggaatcagacaggcaatccgagtttatcctccattgaactgtgccgggtagggttgcccttgctccaccgcaccttgctgggaaagcgcctgtcgacgccgagcaatgacggccggatcgttcataaaatccgtccgcttgcccggcttgcggcgccgcggtttgtagccaatcttctcgctgttggtcttcacggtgtcaatcggcgtccaaagacgaattcggcagtgcgacaagtgcccgtggaaagtatcaaccgaccctcacgatattccgcatggctacactgaaacgctgcatcacgcacttgcgaggacgattgccgagccgggatccctgcacgacgcaggacatgtgatggcttgtcatgagcacccaccgggagacgaggccgactgcgtaggctggctcatgaaccaacttggtccaggcaacaacatcccactgcgcctcaaggttcggtcctgcgagaacatagatgcggtcacattggacggtccgcagcatgaacggtttgtggatacgttgcctaaaacccgcaaggaaccagccgattaggtggtctgcggccgcgacgtgagcgcttcgagatgacgagagatcgtaaccgtaccgcgccgccgctttgccgccaacgtgtatgcgatcgcctgatccaaatttccgattggctaggtcagttgctgacaacatggtggttcatcgcggtcgccacttccattttcgagctaagcacataatctgggcgcgacgccggagaccgccactatgacgacaccaccgaccgaacccacctactgcctggcgttggtaaagcccggctcgcggctcgctcgcgaatagaagctgctgaagccgagctacggaatctacgagtacgaccgagccttcgggacgagggagctgcgttggggtgatgggtcctggcaggaactcaccgatgaagaccatgccgatctgattttgcttccgcggctcggcaagaaagacattgaagcgctttttgactactgagagttcatgaagcagcgcggatctatcttagcgtcagctcgcaagaactcggtgcgccaaaccaacgctccgcgcctttcgccccaggaggtgagctggtttttcaaagaccggatgccttggtaagattgacgcggaagcggtcgcgccggcgctgatagttgcgggtcatttctgctgtggcttttgcttcccgatttcaattgaagcggtaagctgaaatctcggccttgattttgaccttacgcttttacgcgccgaggaaggggaggctttcgaagcccggatgcttggtgcgatcgatccgaaattggcgcgccggcgatgggatttggccgtactggcatgcggagctctggacctaacgctcgtcgacggtcgcttgtcccaaattgctgatgctgccgttgatgtttgatctcgcaatcgccgtggcaaaagtggtttcactgaaacccttaggggaaaatcgtccggtgcctatcgtctaaacccagccggcatacgacaatttccggtttgaagtggcaaagcaaaacctacatcgggtggcagtgccgctttgacgttcgaaagcattgcgatgcgagcctatcggccggcgcagaagtgccgatgacgccggcgcgccagaggcggcggatggcaagacgaaggcggtcggtccgacgggttcgatgaagccagcgcgaacgtcgtttgtcgcctcaactctcattgcggttggtgacggacagcctgacgccgtgtgcctgcgaggggaaggggagaggcgccttaggcttttgccgcgacaagggcggccagcggcgcaatagcctggccatcgaggccgaggcgatcaccgagatagtgccagaacgacaggccgagctttttgcaggtcttcatcagcccaagcatggtgtcgcgcgccacgcgcccatcccggctcatcgtgccgccggagatctttcgcttggtgacgaagctgcgcagatcgttctccgacgcattggtgtgcagcgggatatccggccgttccaacaccttgagcagttcgtccttccggcgagaaagacgagccagaagcttgtcgaggtcttcatagccggtgcgcagcgagaagatgcgcgcgaagcgtttgcggaatgcggcggcaaggccgggcgggggctttcgtttgacgctcttcagcgcccggtagaaccgccacacaagatcccgcaccgcctcgacctgtcgcacctgccgcggcgttgccggcatcaatttttgcagcagccgctccgcatagacccaacacagagcatggttgccgactcggaactggccggcatcgtcagagacgatcaccgtgtcgccgagaagaccgtgatggcggatggatccccagatgccggcttctgcgagcacgcggaccgcctgcctgtcgaaaatgtcgatgcccttgccagccagatattcgaggaacggcacctggtcgcaaaagcgtcgtggttcgtggctgcggattttggccacaagcgccggatcggcacgacggccgtccagatagtcgaaggcggcgtcgttgaggacatagtcttgatagctgcctctgagcagcgacaggaagttcagccgggattttgatgcggttgtgcggaaagcggtaaaatgctcagccccgatctgggtggtgtggaagctatcgcgcgcatgccgggcaccggtatcgtcgacggtgatgtagggggccgagacaaggccggcatgcagcacagccgcatcctcggcagcaaagccgtccagtccctgggtcaaaagtcgcacgacctggcgcttggagacgctgacgccgacatcgttcagtcagccgcgccatcgtcacctgtccttgcgcgtgcagcatcaggcagagccgcctgaggtttggaccgtagccgccgacgaccccttgcggcagcggcgcgagcactgtcttgccgtccggcgtgatccaatattcgcgccggtagtgaacgagctcagctgtgacaatcaggtcccgcacatggcagctcttgggcggaacacgggcgtgcaggatttcctgccggctcacccgctttagatcgagcttcgggccgcgcggtttcttcctggtcgcccgcggcgcgtcgcgtttgtcatccgtcgccttgtccatgcccgacgggcgaaacggcggccgtggcggcaggttcttcagccgtgcgatctcgtcgcgcaaaagctggttctcgaccttcaggcgggtgttttccagccgaagcgcctcattgtcttcacgcagggcggcgttctcggcgtgaagggtcgtgacctccgctgaaagctccttgacctcatcgaccagacccgtcacaagcacgcgcaacgccttcagcgaaagcgtgtcggcatgttcgggcgaggcaagtcgcttcttggccatgatcgaaaggaagcatgatttgccccaagcgcggaatcccacccgcggctccgaccctctacatcgcccgcttatgcacagttctcgcagcgcgtcgatgaaaagtccgccacccaatctgccccggttacccgcgaccggtccaaaatctccgcctggcggaaaaataatatccggatcgagagacccaactactcgtcgttgcacacggggtgagcatgaccgcgaaatcggactgaagatgaccgggccggacctggcgcggcagatggtggggcgctagctcgcggggcggcgcacttcgtcaaagctgccggaagtgatcgagtcatggcaaaaccgatcccttcggccggcattggccaccaagacaccagaggtcacgccgcaggcggcgccgcggattgtcggcgaattgggcttgagagaagggggaggtttcgtggaaaggtgcgctttagctgttgataggttcacgtgcgccggtgaatatcgattagaagttgaaaaggctcttgagcgtttcagatgtcgtatgtattcgagatatttataagcgatcggcgataaagcggaatgagtctcttaatggcacatcggaagtcaaaatcatctcagagaaaacttcggaaccggtcgtcatctctaaccccgcaaaagcgccgtattcgggcctccaagggctcacacgacactatcctgagtattcgaaatgaaacttcctcattggaagcacttagtcgtactattcagtggaccctcgcgaggtacaagtatcatcgttacttggtatcactatccccgcggaccccatcgcagctcccggactatgtcctagccgcgaatgatagtctagaaaatgcgatgaaatggcagattgcttcaatctccgccgttggcggcaagatcgcctctcacaataaaaatacttataccagcattgaccagatcactgattactccgcctccttggaaagggcaaatgcagagattcgaacgtgcatgtggagcttttcgtcagcctctcaagctctattttcgctcgcgagaacgaaaggcctcgacgctcaacgtcgatggatgcaaggtagcctttacgttgcaaatccttcaatatcaaacataattctctatagcaaaggaatagcgtcagaaggagatcggcatccatcggacgtacttgaggtattgaatagatttatattctcaaaatttgccgacgaagagctaaatttgctattgtactacctgacatttaaccctcttctgaatgtcgaggtggcatcaaagctttctcctctccttctgtattttcctgtagtcgatcagtatgagtttctagctaatttattcacgtcagatcagagtctatccaaaccagatgttctgccttttgggcgagattttgtcgagattctgtcatctactggagattggcgcgcaagcccaaaggcagcgctcgcagaaagggtcgaaccaagtcgtttcactattcctttgctgaacagatggtgcggctaccttctcgatagtattgggatactggatggagtttcttcggcgcccgatcgcgaatttgacatcgccttagcaaacgagtttttccatcagccacaatctccccgcgcgtatctggcgagctccatttttgcgatgaaatccgctcagacactcgccgacgtcaagtcggcattatataaacgggagatagccaacgtacacttcgagaaagtagagcaacaaattgctccgcccgatcagcgcttcattgactattcttttgccgcagttgccgctgaagtcggaatttcggagtcggtatacgaaaatcgggaactattcagaattgcttgcatttgcgggattagcgagggacgcacgctcgatacgctcattcttctttgcgaatatacgaatgccgatccatttggatcaagttactttcctgcagacctattctccgcgagcgtaactgaagacgaggtggccaggattgggcatgatccgcgggttgctatcgggctttcgcgcgtggccgctagcctcggcgatgaaggccaaaatctggtctacatcgcagttgaacaacatctcaacgttagaggaatgagcaagccgagtgaaattgtggctgacagtgctgtcgacgtcgctttccttcgtgaagcttgtacctcgagctccttaaggcaatcgctagagtttttgtcaaaggccgagatggaggacgaacggatccaggttctattcaatttggctcaggtggatcctgcaaatgaagacgattacatcgaagaagttcacacaatcattgggcagcaaacgattgaggagcttttgcaacgattccatgtaggtaaagtgcagtgcgatgagcaagcgctttccacatgggcgctcatagaattgagtccgaagttcaaccgtctgaaagattttatcgatgccggattgccgcccgtagagaaggacgctgacattcaatttatcgctcatttgacgtcgggaaaatcggaaacatttacttttaaagttcccaataatgagtcgctcgacattgcccgcacgatcttggcggagttgaattcgaaatatgcgttagacccgcgctatggcgtagactcgtacttgagcctggggatgcggcatggcgcggtcgaagctcatcttcagagcccgctcagcgccgagaatattttgactgcgaaggagcctctcggatacccggacgattgtttctggacgaggtatttcatcgacaatggttttgagtgctacggcgagaaaattgggccggtgctagcaacattttcggagaagtttgacaataagctggaggctatcaagaacgatcttttgcaggttcgtcggccggacaaaccagaagggctaatagtagcagattggtcagaggcttcggttttgtcggcttgcgcaagatttgccgaggtacctgactttgaagccttcattgctgagttcaccttgatcttttgggcgaacgtggaaggtaatctggctgccgcccgtgaattcatagaaaacgtgctttcgaacgagctaaacgagttgctagacgaactggaggcaaacgttcgtcaagcaactgggcagcagcgactggcgcctttctcagatgcactcatgcgcgcacgccaggagctcggcaacgctgtcaacgacgtatcgacatggcacaatgtggctcgttctactgacgttgaaccacttggtctggttgagattattagcgctgcccagaagattgtttgccgcctgtatcccgatttcgagccaagagtaacgttttcgggagacaccggcataaccgtaacttactcgctccatatacttattgaagtgtttaaggccttgttcacgaacgtctacgcccattcagaagtggagaacccagccgtggacgtccacatggcaatgacggttgaagacgcactggatgttgaattcgtcagcgactgcaatgatatgggcaaagctgagcgggccgcccttgatgccaatgaaaaaattaggactggggaatacgagaaaaagctgccgaaagaaggaggttcgggtttagcgaaagtggctcgctctactctgcgagacggaaaaccaaacaccgtgatttcagttgatcattccacgtgcaaatttcatgtaaagatggccttcaaaataatacagatatgaggctcaccccgatgaaaaccttaatcgtcgaagataaccctaaaaagagagcctctttggttgaatactattcgtccgagtttccttcggatgacctggaggtgacatctgctttaatatcaggactgcgggtcgcgcgagatactaagccggagttcattattctggacatgactcttcccaattactcgcccgatgaaaacaaaggctcgcgtatcgagctgatgcctttcgctggccgcgagtttgtgatgcgagtaaatcgaatgtctattaagacgaaggtgataattgtttcaatgtttgagactttcggcgtggcccctcgcttgataacgctcaacagtttggacgctgagttaagggacagataccccaatgtctttgttgaggcggttcattattcccaggcccaagcagattggaaaacagcaattaaaaatgcacggcttagcttggatagataaatgcgaattctgatcgttgatgacgaaaataccaaggttgttgaaatctgtggcgttttacgagacgcccaaattacagaggagtcgattactgtcgctacgacagcagctagtgcccttaaagagctcaaggagagctacttcgacttgctaatcattgatatgtacttacctaaccgaattggtgaggccccaagcctctcgggcggggttgatttattgaagcggatcaaccgtgggaacgatgtgcagttaccggaacatatccttggtttaacttctaatctcgaagctttggcggcttctgaggaggatttctccgcgagatcgtggtttgtcgaagaagtagggccatcaaagaccacgtggaagctccggctgatggagaaattgcagtatcttaaagcgcgtgaggaatatcaaggcaaccagtcgaagagcgagattatctctactcgacccgaatgcgaggttctgtttgtttgcgcgctactcgatcccgaattgacagcgttgcatgcagtttctggatgtgactgggaagtcgtaacatttcccggtgacccaggaatctattggtcagctagcttgaaattcggtgcaaatacggtgtcggcgatctgcgtttgcttgccgcaaatggggctcgttgcagcgggtgtcacggccgcgaaggcaataacgctattcaagcccaaattggtggttatgaccggcatctgcgctggtcgaaaaggcgattgtgacctcggggatatcatcggtgcgaatctgacatgggactatggcagcggaaagtttactgaagttgccggtgcggttgtgttcgagcccgcgccgtttcaagccgccgctaccgcacgagtcgggggtgtgttggcggaactttccaacgataacgagctattgcagaagctgtataaggaaagtccgggctatagacctgctaaagttccgaagtttcatgtggcgccgctcgcgtcaggcgcagccgtccaaaatcataaggagtttttctctggcgtagttacgcaacagcgcaagatgttgggggtcgacatggaagcgtttgccatagcctgggcgtgtcacgaggcattagagcctcaaccaagttggctagtaataaaatcggtcgtggattttgctgatggaacaaaagatagccaaatacaatcgtttggttcgtatatcagtgcatcactggcaatttacgcagtcgatagactgataaatcgttgatggggtgtcagttgccggtcagtcgtccggattcggtggcttcttccggttcaaggcggtcgccggtcaggagatcgtgccaccctaggcgggtgccccgctcatttcgatgggctggctttcctgttcgcgcgaggcattctcgtgcggatgatacataatctggaaacagggctcaaagctaggcgatcgtatccgctagccgctgcgcaacaccttgtagctaccggccggaggaagaagcgttgcgcagaggaacatcgagagcgagcatttgggggatagtccgcgtcatcttaagggaactcataaagccggatcattctaacttggaaggcaaggtgaagtccgtcggactgaggtctagtcgttgttcgaagttttcgaactcggcggggctaagaacaataccattgccccccaccaggccgcccgtctgcggaagtccctgcgcttgaacatctgtaaagctcgggatttggccgtcgggccaggcgtcgatgctatcgagtttgatctgttttggttccagaatgacgccgagcaatttcgggtcaagccggtagtctgacgtggcaaacatctcgcgggcatttgtggcatttgtctcaatgctctcgagcgagccactcacaacgccggtaggcagtaaatccaatgtttcgccgtccgaagtcttgaggttgcgtgcgatcgcgttgaacttcccgaccgcgacagccaatgccttaggatcttcgagatttatcgcctgcttctctactgttgttgtgaccatcttcggcaatgacgagcaagttctgccgccgaacggcgtcggcttgcactggagctcgttgacgaccttagtctccaacgtccagtcgggcccataggtggcgacagcccaatacatggcctttgccttccaccccggcactccgtttgcgcgcatgccgtagtagaaatttcgatgtgtgtcgtgggccgtgcgggatttggtctcgcagaagtagtcgtggatcaccgatgccttgagataagcgccctcaaagggaccccctataatcgaccaaaaagtctgcgggatcgacgctccatcaactctcgtccccgtgggcactggccactttaggccattagggtcatcgaagctgaagtcgctcgacagctcgaacagtggacgcggatcagcatcgataaactgtcccgcgggtccgctcgagaaggtgccgaaaaattcggctgcctgggcctcggcgacgccgaagcccagaataactgtggcccccaacaatcgcttagaaattttcgcgatttttcggatctctgccggccaagcgcttcccatgagaattaccctcctgtcaggccgatgtttcacaagtttgggagtagttgttgcaggtcgcttctgttgagtatctggatattgcgcagttgcagctcattgattgcatcgttcgcgttcttgatcgcgctttgcgccttgcccagacgtcgccttggtctgcgttcgtcgcgaggctcttcctcctcgtcctgcacggcgacgccaatggtgacggtgtgtatgtcttgtctccaatgggatgactctgcgtcaacagccacgatcttcaaatggttagcgggatccagttcggcactgggagtggccgagaagctgtttttagtcgtgaactgaatctcatcggcaagtttgttgacctttggctgtccactatcagtgctgccaagaatatggtcttcattcaggcgccaaaacgtatcgattatttcttgaagcccgatgtatccggttatgggataggcgtaatttttttcgcgcttgaactttccgttctcggaatagggctcgcacctcgggggatccgtgaatagcttgtagaaattatcctcgactctaaaacgccgctgatttcggcgcgttcgctcgtgggcaccggaaacacccaagttgaatattccactgctccaggtatcgttcagagtagcgccaagactgtttctgctgtgctgcgacatatcgaactcgaagtcatagacaatcgcagcatttgcgtagagatcgatcttctttcgtgttgcatttggaagtcggctgcgatcgaagttcgcgattgtgtttgggtcttcctctatctgggtgacaatttccggagatacgttgctgcgactgttttttaagtactcaagcagttcggacaggacggcatctcgcgcttcgcaccgaattctggtgacgatcgcataagtattcaatcgggtgacatcttccggaagtggcctgatagcgcagttcggcaacaaagccgctgctgctgtcaacgcgatcgcatgcctcatcagtgccccccgacaaagacccgctgaattggtcaacgctgagaatcggcggcgctagcttttgccgcataattccctcattagtcccctctaaattgtccgaaatgccggatgatggcaactttaaagtttagtgatcaacctatgattatgtttcgcgtgccggtcgccggctctgttgacaatgagttagtccaggcttgcatgtcgcgttttattggtgtctgatgggtgatcttaccagtcctgcgggtatcttgcccttccctgtaagcatggggttgtgtcagtgggcggaaggacctgggcgaccatcgccacgcttctgcagacgtcaaaaatgaacaacgtcgatccgctcgcttagctcacgcaaaggccccgatcttttcagtggcgaggagcgatctagttcagcgccaactctagcaaagcacgcctgggttcgtatcggctatgtgtcgtgaggtctcgaggcgtgggatgtgcagcgggtggccgtcgcagttggtgacgtcaaggaacttaacggatagattgtacctggttccacaaaacacgggatcgcgctgccgcggcttgaggcccagtggccaggcacgagttcaaagtgaaggaaccaacgattcccacccagaatttccgacagctcgcgcgatgagttttctgtaagcgtccggtgaggcagcttcgcgctgacggctcgcctttactttaccgaaacggctcgtgcgacaacttgtagtttgatcgcgtcaaaacagccaacaccggcgaatgcccagaacaacgaaacggctactggataaactccgcgaggtcgaagcgctccgaggtgacggtcgctcaccacctcgggggatgctgtcaagattcggaaagggtatggtggcctttctgcgggaatatgtccgtattctcgcgtatcatctctccgtggggccgtttccccgcctcagtaaaatcattgctgcagtcggtttagcggtgtctggtcccggagtcctctacaaggttatcgaggcgatcattgccggcgaagtccgcaatcgcggggcggtcattgcaaccgcaaaagaagaacctttcgaattctacaccatgacgctcattgttggctcgggggctgccttcgttaccgccttgggtgttgccgccttcctggtcctgatattgaagggccgcccatcgcgcagcgagtgatctattgccggcgcgaccgatgctatcgatcttgatgccgcatgttccacgggagcagttctccgatcctgttgatcggatggtcggcgctgcgggtgaggacgtcgcgaagataggcttcgggatcgagaccgttgagctttgcggattggatgagcgacaggatcgccgcggcacgctcgccgcccttatccgatccggcgaacaaccaattctttctgttatgcatatctatacataacagaaagtcatggctctttgccggctctgatcgaggtgccgatcgcgccgccttcatggcgacactgagctcaacaacgtcgatccgcaggcctggctcgccgacgtcctcgcccgcgtcgccgacacgccgatcactacgctggagcaattgctcccgtggaattggcagccgccgaagttcctgcgagatcaagctgcctaacctgcggccttggccggatggttacgtctcagcggctgcaatcgccgcaggatggcgccctgacgaggtcgcctcaacgttggttgaggttgccgaccacgacatgttcgcgctgatcgaaaaccgcgatctagcagccgatcttcccatcctccggttccgaccgcggtagcgtctgtcgccaagtgccggcaggcggcccgagccgtcactgatttatggtggcggcagcaacagagttggctggccttgatcgtcaaagaatgaaaccgcgttcgaggctcgttgctctcgccagtatcgttcggattgtcgcggtgctccaacggtcgcgccgactgtctgagggctggcaatccgttgcggcccggactcaatctgcggctttgaacgcgcggtatcgcgaacttcctgcggaatcggaataacgcgctgagacaggtgactaaggaaagtggtctcgcgtatcggaagccctcggctattctctcgccttgtcagtctgcgtacctcaacactcggagcgtcgtcgccggagagttggaggggttgcctgcgcaagaactcatccataaccagcctggcactggcactcaccggcgctcggggcagctggaccttcgtgtgaccataccggccgctgacactggcaggccgcgcgaaaaccaaacgctcgttttgcgatccgtcgggccggacgccgaaaccgggattgtcttccactcccacgacggtaagccacgtcggttcggcagggcttaggcccttgaacccgaaatagggcccgacggcgctgccagcgcgaacatacgcttgaagggcaagataactccggtgaaacttctttttctcgcgctcgccacgatgtacagaagacatggcttgatgaagcagcgatgcccctatcgaaaaaacgggaagcccgcggctgagtgcaacgtctatgcttttccggatttcggcttctgccaccccgtccgtcattgtgccgagtgcggcgtcgaggatcgcaccgtcggcgatctgagggaaccagttcatgaggttccgcacccaacctcggcgcgcggccagctttttgtttcgcaggaggaaatagcccgccgcaacggcagatataggatctccgactttgtcctggaggaaccgatccgcgatctgaagggtctcggcaagttgattggcctctgcaatcgatccatccgacaggtaggtgaggatgatttcgttgtccggaatgtcgcgcgctattgctatgtcgatggtgtcgctgtcgttgccagcgcttcgggtcaatgccacgcggaccctctgcccaggaggcagggccaccaaccgccatccaacgtgttcgccgccgacctgaagcagatgggggttgttggggacggggatcatgatttgctggacgccggtcctgtcgctcaaccgttcctccaccggtagcgggctactttgccatcgatcgtccaccagcgaccacagcgtcatccaaactttgccgatcgggggagccttggcagggtcgtcgccagacatctcgaccagatggtcgagtgactggaatggcgtgacccactccagccaatccgttggagccgtcttgccgatatcgaaagtcgcatctcctttatcaacttgccgattggcgatggtctgcatcgagcgaccgtcggggagcatagctacaacgtggaggcgatcggtttgatcgcgacggcgctcgtcaatcgttactttcgcggatcgctctggcgaagcaatgccagaggccaggaggtcacccttggacgagaacacgttgaagggaagcgttagtaggttagtatccttctgcgacccggaaacaataaccgttaaatccatccgacaatcccctcagtcgactttgatgaggcgacgaactgcagcgttcgtcagtagttttcgattataaatcttctccggaaaggacgtgggatcggtggaattcgttccataagtccattctccgtgctccctgacgaaccggaccgggccggttgcgagaggctttgtatccctgacgagagcggtgtcttccatgaaggcttgcgcgatggggcggaaaccttgcggtagcacgtccaattcaagcatcaccgacgggcgttttgacaagacgtggagaggcacggtccagttgccgtcaccctcggtttttccgattttttggcgatctgccatgccctcgggttggaggaactcgagaaattccgatattgcggcacgtaatcttgccacgtcgacggaatagccgttgccactcggatgctcgaccccgcaatgtcctcgaagcgctgacaaaagggcctgtgtaaagtgggcaactcctccgtcgggcgcgtaggccaagcggttcgctgttgtcgcccggacgattgcccagtcggtcgttgtcagcgcgcctctccgcgacccgccgataagcgccttcggatcctcaagctggtttatgatctcctcgctcaactccatgcaagcgtcgatgaaatagaagaggctcgccttggactttcggagcgtggcctgcaccgtcatcgtcaactgaaagacggcattccaaatgtcggcttcatcttcaccgaagtcatctgcgaccagatattgtgtctcgccgtcgctaatcccatggccgcagaaataaaagaccccccggctctggggattgagtttaaggcgttcgagccaggcgacataagcggtcttgaggtttgcgattgacgggcgcgtggtcttaaccttggtgccgaacggtgtgtcgtaggaaccatttggcgatgcgagcatcacgagtgagccgagaggggcatccgcgttagagaacgcttcgctcgggtctttcgcctgaccggctggcatcgcatcggatccggtcagaaaccagtcagcgacggcgaccacggagatcggcggcgacgtgagagacggcaggcttccatatcccgcagccgcaaggctcggatactcgccgcaaccgatcaagaggacatgcgtcgcggcgacggtcggatcggctttcactgccgtggattcgaaaacgatgctcatcgatatgtctattccgaccgccatgcgccccgaaaccgccatagcccgtgtcgtactggaaatccttgacgctcttgtaaataccctcggcactgaacgagaaaacgtcattggtgtcgaagacgttcagccactttccgacattcggattggcggcaatgcgatcattcttcggatcagtcggcatcccgggaggtagcggtcgactatagagcgccatctcatcgaacaaaccgacctgtgaaccgattgttgccaggtagtcgactttcagatccggagcgaaataggaaagaatatcgtaggtgatgaccccaccaaggctatgaccgacgatgataagcttgtcgtcgccctcctgccgggcggcatcagcgttacggaacgcctgtagaaccgccctaacaatcgggccgggcgccgccgcggtcccgcgatttttgaggtagacgaatacgtcgcccaggaatcgcgacgctttctgatgcgcggatttccgccccagcgccagcaaccctgctgtggttgcgtcggcaggtgccgaccccagcctggccaaggcctccttggtcgaggcgagccatccactcaaaccgaacgtttcgagctttttctcgtctgccggcagttccgcaatgcctctcagcagtgcatcgagaaattcctcattggatagcggctcggctttcaacgcccatgccggcgcgggatatttctcgatgtaacgctgtgacgcctgatacgccgctgcgatcttctcaatattctcgggagaattcgcggtcgcggctgcagcgtcccaaataagatcgacggcatccgcaaacgattggtcgcggctcaccttgccaagaataacggactttgcgccaaaggactgttgaacctcatgaagccagaggtcgatttcatttttctgcgctcccagcgccaaggtctcatagccgccacctggcagcgacacctggttccagaggaacttgacgccgtctccgccccaataaggaaagctgatgtgcaccttggccgggtcgagcccgagcggcgcggcaagcaacgtcttcaagaattcttttttgcgcgcgacgtcgttgtcaaagccagcatcttccttgcgattgttgaccccatggacgaacactattggcaaaacgacctccccaaccaattctgatgccttgaatcagttgtagccgaggccgcgttcgccctcaaagggaaaattttgtggttttttgcgtaagggggcagcttacctgtcaacttgcggagtcgccaaggcgctcatgaggtcatgggaaatcgcggtgacgacaaacaatgttggaacgcttgcgactgcgacagccacatcgattgcgccgagcatcttcaatatgtaaccgcgccttgcattgcactcgtcccattcgtacaccatcgagagatccttcactcgctgagcgaattgaagcaaaaacatgtgccaaaagtcgagtgcacaaatgacactcgccgggggatcaaacgatctcgagtgagaaatcgtctaggatttgtgcgacttcatcgcggaaatccagcaacggtccggaagacttcacgttgagcttggggagcgcccgatcgaaaagggcggtattggcttcgccatttaggcgggagtcgtagatgatcccgtccggtttctcgtcgtggagccagagtgctcgtgaccattgcttcccgagttcatgcgaagcggcacgggcagcatcggtcggtatgcgcatgcgcagcattccgtcggagcgcaggtccgcgagcagcagaggttggttgatttcgaccgacgcgcaagaaacctcctgaagttctgcaataccgataggaaaagagccttttgaaccgacggcgcgttcgcgcaagatcgcttcggcaaagcagacctttatgctgctgccaaaataaacaacgccgaaccggtcgggaggagacagggttgcgcgcttcgcaaaaactggacattgattccgctaaatcccggacagcaatttcattaaagtccggacagtttgatgcggttggtcctcggcagcctggttagcatcagggctgattgatttcgccgttttctgccccagtcaagaggggtgcgcttttttgctttcgcatgctctcgccccggagggtgatgcggtgagcattgtggacgatacggtcgagtatggcgtcggcgaccgtgctgtcggcaataaggtcgtgccagcttgccacgggaacctgagctgtgatcagggtggactttcgctgataacgctcctcgacgatttcgaagaggtgaaagcgctgctgatcggagagcgtatgggttccaaagtcatcgaggatgaggagctggacgcgggtgagcctgtcgatgaggcgggggaaggagccgtcgaggcgggcaagcgcgagctcctcgaacattcggggcacgcgcacatagagcacggagtgaccgagcctggccgcttgcctgccgaaggcacaggccagccatgacttgccggtgccggtgtggccggtgatgatcaggccctcgtgggcggtgagccattgcccctgggcgagcgccatggtgttgcgccggtcgagaccgcgggcggcggcgaagtcgatatcttcgatacaggcctgggcaaagcgtagcttggcggaggcgagccggttacggatgcgcttgtcggcgcgcagggtgacttcgcggtcgagcatcagtccgagccactcatcgcggctgagctcattggtgccggactgctcggtcaattcgcgccaggcggcggccatgcccgtcagcccgagggcctgcatctggtcgagggtggggttcgtcagcattcttgcttccttcactggtagtaggatcggccacggatattggtatgcgcaggcgtgggggccgcgtgttcagcctgcggtctttcccggtcgaggccggatttgaggatggaggcgacggaggaataggtgatggcattaatggtgagcgcccgctcacaggccgcctcgaggcgctgggatccatagcgcggcgccagcgacagaatgcccatggccgagcggtatccctgttccggatgcggcctgtcgcgcatcatgcgttcgaccaggatggcggcattggggccgatctgggtcgcacggccgatcagattggccggcgtggtgttggcatagcgctgatgcgccttgggcatatggtcgttgacggtgacgtggccggaacgctgggagcggcgaacatggctggcgacacgctggtggtcgtggaagatctcgaccacccggtgggtgagccgcacctggagggtgcatccgatcagccgatgcggcaccgagtagaaggtcttgtcgacctcgacatgatagtccggatggaccttcgccgacttccattccgcatattcgaacggtatcgccggcaagggcttcaaggctggccgctcgatctcctcgaacagctcgcggcggcttttgccgacatggcgcatcgtccggttgttcaggtcctcgagcaattcggcaatcgccgtgttgagggcggcaagcgagaagaaggtacggttcctgagccgggccagaatccagcgttccacgatcaataccgcgccttcgacccggcctttgtcgcgcggtttcctgctgcgggtcggcaggatcgtggtgtcgtaatgctccgccatggcggcgaacgtcgcagtcaatgtcggctcgaaccaaagggccttggccacccccgatttgaggttgtcgcacacgattgccttggtgaccccaccatagaaggtcagagcacgcacctgaccgtcgatccaatccggcaactgctggctaaagctggcatgggcgaaggtcaggttggaggcgcccagcaccgcgacaaagatttgggccggatggatgacaccggttgccggatcgatcaccggcaccgtcggcccggcatagtcggtctgcatcacggcgcccgccgcgtgccgattgcggaacgctacactggtgcgctgccgaaaggcggcaacctgctcgcagaaccaggtgaagccgtaaccatcaggatggctggcgcggtattcctgccatagaagcgtcagcgtcacgcctttgcgcttcagctcccgaaccaccagcgcccagtccggctcgctgagatcgcgcggcggtcgaccggctcggccgaacagccgccgctccagctttgcatcctcgtccgcgccgattggcaacggccacgaaagcccggcttcccgagatcgcagcaaataggtcgataccgagctcttgccgatcttcagccgctcggcaatctcgcgcaccgaaagaccctcttcatgggtcaggcgcagaatagtccggatatccctcactgtcgttcgtcttgcttgcttccgtctcggcatcggcccctctcaacgttgtcgtgagaggcctaaccaacaagacggcgcagccgcgaaccaacccgtcaaaccgccgccggaaactgtccgggatttagcggaatcgctgtccgggaattactgaaaactgtgtccggagattaccggaaatcctgtccggactttgccgaaacccgcagccggcaatgatcccatcaaggaagggatgagcgttgaggccactatctataatgcctataacgggcgccgtctggtcgaccgtattgaggggaggggcctcagcaaggaccatgtccatcgcttcggccgtgacaatgccaggcgttggcggaaggtccacagatgctacttcctcgatcgtcaacaaagtccggaccaacacgccgttcagccggccgcggagcattgtgatagaaggaccgacatactggtcgaaaacctcagccccacgcgcctcgatgtagcgaacgatgtcgtcgagcttgcgctcgcgaagacgtcgctcaccgagatcccatatctcaatatcaatgagataggcttgtccatcttggaaatcggccatttcaacaaggccgtcttcgcggaaacgaatcccaatgcggtcacgtggctcgaccgacccaatggtttcgatgccgcctatgaaattgttgtagggggcgttcttttggcccgcgggcgcgccgcgttggtaggcatccagccgcgttctgaactctgccatctcgtcgttggatgcgaacaacactagcgttcggtcggcgtcgctggataggaccgtaagtccgagttgctcccagtctgcttcctgcagtgcccccgtcatctggacgcggaggatcagcgctggatttacgaattccggcttgcgtctccggcgttgctcgtctcgggcagcgtttagctcgtctctgagctttgcactgtgccggggaccatctctgtcaggcggcggactacctccgccgtgcttgcgtcgctcaagctgttctggaagtctgacgagctcgagatggtcgtacttggccacggcggcctcagatcattggtgcaagacgggcttgtccggcacgccgccgcgcctcgtcctgaagtgcacggttgaaatcccgctcctggacttgcttgcgacgctctatgatcattgctttgatcgcctgagtacagacacgttcaatttcggcgaaggaatagccctcgagtgcagccgaatttcgggccgggtcgaacgcgacggggacattcttgaacttgagcttgaggaaacgaccgatcatcgcggcttcgggcctgtcaaaccaaaggacctcatcgaaacggcgccagatagccgcgtcgagagagcggtcgaggttcgtcgctgcgatcagaaagcccttcggctgcatgttgtcgataaagagcagcaggctgttaacgacgcgacgaagctcgttgtgctcgccactgtcgtctcgggtcctcgcgagggcatcaaactcgtcgaaaaacaggacgcacggctgcttccgtgcgaactcgaatgtctttcggatatttgtcgccgtctcaccaaggtaggaagaaatgaggcgatcaagcttcacccggaacagtgggagtcccagttcggcggcgaaaatttccgcgcaaagcgtcttgccgcagccaggcggtccgcagaaaagcattttcgagcggaccttgagaccgtgctggcggatctcatctgcccgacgaaattcttttaccaggccaagtagcaccctcacgttggcggcgctcagcacgatgtcgttgcgattatgttcgggttcaatacgctcgacgaaatctgcggcagcttcggggaatgggatgaggggggcgagagctttcggcgcagactgtgtccgctgaggaccagcctcaagcgttttccgcaatgtccgtgccaagacgcggttgttttttttctcttcctcgtcgatgatctgctcggcaacggcgcgaaaatcctcatcgcgcccgtagctagccagcaattttttcatcaactcgccgcgtgccatctgtcgtccgtctattcccttatgctcgaatcacagctcgacattatcctgtcaggatgatgctaccacatgatttagacaataaccttggtacggatttagttttgtcgccagcgaattcagcttgtgcgaagggattgtccacgtcgttcaacaaggtcgagggcagcttttcggtttttcgtaaccggctcgatttgatgagcgaaacgcccggagggggcgcagtcgctcccgcggctccttcgggccactatattgccgctcctgcggctgcttttttcccagcctttgtgtgacgcgaattcccgctgtcgcttggcagttaaacgtgagaatgcggctgtttcggccaggtttggcatttgaagatgagaatccgaccgaccggattctcaaattagctgcaactgcgaagacgtcatcgatcggcatgtatgggtcatgatctcgtcgatagcgttgctgaatcgcgccttgttcccacccatcatttggccacgcagcatttggagcatctcgggtccggcccgttcgacgatggccactccggccagcagagctggtcgtagatgcagcggtaggatcgggcctcgagagtgccttcgtctgggagcgggaaggcgattggccagctctttgagagcatgagcgacaactctttcacgtgcactgtggtaaatcgtggctacaaaggcggccgtgatgcgcacatcacggttcacaacagcaagggcagccgtcatcacttcggcgacatcaactactcatggcaatcccatagcgagtcaaacacgtcaaacggtcacgtcaaagtcgacgcagacgagtacaacatgttcctctcgctgaacgatttcatgagcagcgagaaaaaacgctatgacgcgaaacaggtcgccgacgtcctctggctcgaattcaccaatcaggcagggatcgaatatgactgaggtgaagcgtttccaatgtctaaactgcggtcatcgcttcgagattgacgtgttgacgccggatgagaaaaaggaggcaaggaggaaagacgagccggtctacccagtggcttgcccgcaatgccggcggaccgatgtaaggggtggctggggctaggcgccgttcaggcctcgccgataaactggattgggaggtatagctttggaacccccgaggaggaggtctcattgtcgaacgatgcggaacctgaaggaattggtgctatcgaccagctctacgacatcttagagatgctcgaagaagatataaaggatctagagggagcgaggcgagagcgcgtaaacgtcttcttgtaccagggcatctttgaggcgatcagttttttggacgaactcgggatggctggtcggataggtctatctgcgatggaactcgataaattccaacgcatgtctggcacaatcgacaacgcggtccttcgtcaaatgaccggacgcttgaagagtttattgcgggaggcaaactgcctctatgaccgataatgggggcgcaatgctgccgttcacagacttaagggacttaagagtggacgtcgccttcggggcggacaggatcctgctcccacgaaccctgcacggcttgttgctgtgatgttcaccttttgggccaggaagatcgcataatgtatcgactggcacttgcccagcttccccggggctggccgctctttttgaataacttaatgttagccgtttggcgatcagtaagctggtatggtgggcccggcggcaaccagtcggtcatgacgccgacggggcgctaaccaattaactacaggtcccaccaggacgtttcaagcacggaaaaaccgatggatcagtcgcgtagcgggatgctttgaagaagtgttttgaaccttgacgcaccagtgcggttcatcgataatcaaagtgaaccaaggaaggttagatcccatgaccgctgcgtttaccgtgcgtgtaaaagatgaaaccgcgagcaagctggaccagctcgctgagaagctggatcggtcccgctcttatatggctgcagaggccatcgaagctttcgttgagcaacaggaatggcagcttgccgagattgaagccgggttgaccgaggccgaccggggtgagttcgccagcgatgaagatgtggcgaaagtcgtcaggaagtacgtcaagtctgcccgccaatcatgagtcggaagcgtattcgttggacgctgcgggcgttgcggcgacttgatgagatcggcgcgtatatcgagaaagacgatccggatgcggccgctcgcgtcgtggcgcggattggcactgccgtggatgcgttagcggagtaccctgccagtgggcggcctggtcgtatcaagagcacgcgcgagctcgtgctggccgacattccctacatcattccctaccgcataagtcgagacgtcgagatcctcaccgtcatgcacgctcaccagcaatggccgcaggttctctagtcacgaccaacaaaacgcgtcggcacgatgagcgatgaatccgctcatcagcctgcccgtttatgtagaagcaatttctgcggcggcgagcgcagtggctgcctttttagtgatcgcttatgccgtgtaccaagtgtcggaaagcaagcgtgtgtgtcgacgccagcataacaatgtctttgatcggtcatgccttctccccgtttgagcctacgagccaccgcgatcttcgccgatccctgtactggcgctcggaaaaggcacaggtccggcgcgaactccccacggggcatcgatcacggccaatccgacggggcacgcgtcccccaggtgctcgaagcacggggcgatgggtcgttcccgactagactaatcggctcggttcgggaaggctacgccaattcgggccgtcgcccatggtgcagagaagttccgctacgcttcacgtggccacacactgcgagcatcccaagaaccgcatgagaagggtggggtcggcggttatggtgtggtcgcgacgctccggctggggcagggggcaagcgcatcggtatccgtgcggatatcggtacgcagccgatcgaagaggcaccatcctggtcttctcgagccgaaatccgggcgccatgcacgcctagggccatgacgggcacacgacgatcctgttcgccgcggcccgccacctcgccgagcacggcaagttcaacggcacgctgacgctgatcctccagccggccgaagaagtcggcgccggtgcccgcaagataatctagtaccggctgttcgagccgtttccggtagatgcagtctccggcctgcacaactggcctggcgtcccgtcaggacagttcggtttcgtcgaggggccggcgatggcgtcagcggaccaggcgctgatccgcatcgtcggacggggcgggcaaggtgcggcacctcatgaggcggtcgatccggtgcttgcgcctccttaatcaccgtcatggctgagccggaaggggcgccactgggatatcgcgtttcgcctcacctctaatcgccgtcggatgaaagttcgaaacggatacactcccggccggcggcgaccgtggccggtgccgttcgctcatccagcacgatgtcgagatggtcgtccttgcgctggctcatggcggtgtctctcatgctcgctccatccgtcgcatcggtcgacggccttgcgtcggatcggaccgaggcagcgcgcgcacgccgccgcctgccgcgcgttcaggcgggcgcatgctggcctccccccgcagcgtcgctgcggtagcggctggtcgaggtctggtaatagtgcgcgcggatggccgccatggcctcgatcaacggcccccacggcgcgggaaaccgttcttccgccataacccggtgcagcatgcgcgtatggccggccagttcgtcgttgaggaactccaccacaggcatagccggatagcgctccagcagcaggatcgccgcgttgtcggcctcgccggccgacctgtccttgtcgcgtccatgcagatcgttctgcaggcgccctatcgccgagatgagccgcaggacctggcgaaacgccggacgcgcgcgcaaggtcgccatgtccagcccccacagcaacgacaggcaacagaacacgtttgcgtaggcgatcgaatcgatgccgttgtgcaggtactcggcgtaggaccagcgttccgccgcccctgccgcctgcgcgtgtccggcgcgcagcgccgcgcagtagcaccgggtatcgtcgagaagctgagcatagtcgcgacgatcgtaggcgagggcggccagcgaagcgcgcagcacagcgcagccctcgaatccggggagcgcgcacggcacgccctgccccagcgcctgctccaccgcggcgagctgctccggcgcgatcaggtcaaggtcgttgcaatcgtcgagccagaacagcagcgccagttcgcgatagaatgccacgatcagcgtttcgtcctgcggatcgcgaccggtgcgggcgctggtgtcgcgcaggctcgggtggatgcgctgcaggatgtactggccgcccctgacggcttccgcggcatgctcgtcggcgaacccggtcagggaacgcccccactccagcacctgctgcagcccgcgttcggtcgggatcatggcgccgctcctgctccctcggccgggacgcgcggcccccaacgaagcgccagccacaacccggcgagttcggccacgcgcacgacccggatggggcaatacagttccttgccgatccacagcggcatctgcggcaatgcaggcgccgcatggcgggcgagcatccactccagcgcacgcgccaccgcctgcgcgatgcgccggcgccctgtcggctcttcgctcccgtccatcacgtgcaacgcgaacagcgcataggcggtttcctcgaatgtggacgcgcgaccggcgccccagccgccgtcgtcgcgctgcgcctgcagcagcgccgccagcgcgcgctcgtcgcgccactggggcttgccttgcgccagcgcagcgacggcatgcgcggtgggatacagccacgaaacgtgccatttttcattgtcccatagaccgtgagggttgcgattggcctcgacgtaggcgctggtgccagcggcaggctttcccaatagtcgcaacgcatgcagggcatggatgttggtcgacaccgaggcgttgcgctcgccggggaaggtgacgaacagctcgccgatttcgaaatggcgcaacgcatcgaccgccgggtcgcggcctgcaaggcgcaggacgcacaaggcaacggcggtgtcgtccgcatcagccgcgaagtgcaaggccgggcccagaccgcgcacgcccaggcgggcgtcgagctgcgcgacgatcacgcgcaccgcctcgtcgagcgcgggatgcgcgaacagcccggccaaatgtagagtgtacagcgaccagcatggctcgaacacattgatcggccagacgttgggaacgacaccttcgatgccgctgcgcgtcgcccgcgatgccgcctgcagatacgcgtcggcgcgcccgacctgcggcgtgctcccctgtgtcacggcgtgcgcacgccacgcagcggtggccgccggactgatgccgatgctgccgtcgtcatccgggcatgcggcggttggccacgtcccccaggcctcccaggagtgcagcaacggatggccgctcggcaacgtcgccaccgcccccagcttgaccaagcacgcttgccgcaacggcaacagcgcggggtggcgcggaaacgccacgccgcccaacaaggatgcggcctcgccgcacaactgcggcaggatcagctccgcgccgatcggcgcgtcttccggcaccgcatgcgcgtagggatcggcctggcgctcgaggaaccgggttgcagcctggactgcgtcggcagcgccgggaagaggatcggcacgctgcaatgccagcaacgccgcccacgtgggcgcatggcggaacagcgggaagtccgcgcttccccatccgccatcggcctgttgctgcgcgaggagccacgcgtatgcgtcctgccgaccggtgacgttgccgccaaactgcagagcccgcgccgtgtcgtagacggacggaccgacgctgccgccgtcgctcatctcgctcagcaggtggcgcaattcgaaaaggatctgttcggacagcgcattcacgggggatgttccttctgcagacggttgacgagaaccaggatcgggcagacggcgcgcacgtcgccgcaggcccgttgcggcccgccgcatgggcagcgccggacggccgctctgctccggcgcggcgatgagccccgatgcgggcgccggttctccgccgcatgggcttgcgcgcagcgtgccgcgtgcgccgtgaccgtgctgggcaaccgcggcgatcggcgccgcggactcggacacagtgctgcatgcatggctgccgccggccgatcgcagcggcacaggggcgactccatgcggacgggcgcgctcatgcggatggcgcgtgcttgaacaggtacgcactggcccgctgcagcatctgcgccaaccgttccgcacgcggccccagcggggcaatggcctccccggcctcacacaacagatccagcgcgaactggcgcgctgcctgcagccccatgatcgacgcgcaggtcggtttctgcgccgccgcgtccttgccgggggtcttgcccagcgtcgcggtatccgctgtcgcgtcgagaatgtcgtcgaccacctgcaacgccaggccgaaacaggcgctgtagtgatcgagcgcacagtacagcgtagcgtccgcggcatcctccgcgatggcgcatagggcgcccatgcgaacggacgcacgcactagcgctccgcacttcatccggtgcatcgctacgatcctgtccagctcgacgtgctttccgaccagcgacagatccatggcctgcccgcctgcggcaccctcggcagacaccgcctgcgccagttcgcgcacgagcgcgatacggttgtcgcccggcgcatccaggcttgccagggtcaggaaggcgtgtgcctgcagcgcatcgccgaccaggatcgcagtggcttcgccgaacttgacatgcacggtcggaaggccgcggcgaagcacgtcgtcgtccattgcgggcaggtcgtcgtggaccagggtacaagcgtgcatcatctcgatggcggcgccgacgtcgtcgagtatgtgcgccggcgtgtcggccagtgctccagcagccagacagagcagggcgcgggtgcgcttcccgccatgcaaggtggcgtagcgcatcgccgccataagctcggtctcaccgtggtcttcggcgcagagaagacgcgctagcgcctgttcgacccgctttgcgccgttctgcatccagatctccggcagcagcctgccggatgcgccgcgcgcccgcgcgcccaatccgccgagggcggaaacgctagttcggtcgtcgtgtagcgtggaaccggtctgcatgttgttcatgtccttgtacctgacaggagacggccacggcgagcgtcgagccgccgcggtgttgccgcgtcgcaccgaacgcgcgcgccgaatgcagcaatgccgcgcgtcgccggtgccgctgcctcgccacacggggcatgcgatgccagctcatgagaatccgatgcggattgtcatggacggatgtgcggtcgggtaatagcgccggcctttttcgacgccgctcagcaacagcggccgcaccccggccttgtgcatggtcagcgccaaggcgatggagaactgcaccagttccagccataccaggtgatagccgatgcaaacgtgtgggccggtaccgaactgcagcatgtccaccggccgaatcggctccgtacgttgcagccaccgcgccaggcggaactgatcaggcgcctcgtgcagcagcgccgaggtcgagaaatgcagcagcgggatgcacagatgggtgcccgccggaatgcgccgttggccgagttgcagttcctgcagcgcgcgacgcggcaggagcgtcgtcgccggatgcacgcgcagcgtctcgcggaacagcgcctcggcgaccggacactgctccaggtccgcgtgccgggtcggcaccgcgcctacgcgttgtgcctcctcgaccagggcatcccacagcataggctgccgcgccagttcgatcaccatccaggccatcgtcgaggcggtggtgtcgtgaccggcaagcagcagcaagcggatattggcgaccaggaggtcatcggagagcgcatcgtcgctgcggtcgaaggcactcaccatgtcgttgatcaacccggtgcgcgcggcatgcgcgcgtgcgtcgcggacgaactggcgcaactgcgcgtcgatccagtcgcgggcggcgcggccgcgccgcaagggcagtccaggcaggtcgaccgagggcgcgacgatcaactgcagtagttgccggtacttgcgatgccatcccggcaggtcctgcgcagggactcccatgagggtgaagatgagcttgagcatcaggtcgccggtttcgggcaggatggttacgtcgccgcggtcgcgccacgcctgcacccgcgcccggataacgggcgcgaacaggtcgccgatgccggcctgggtcagcccctcgggcaggaacgccgccttaatcgcatcgcgcgcctgccggtgcgcgccgccgtcctgggcgaccaacgttccgccaagcaattcgggcgcgatctcttcgatcagcgccgaggacacgtccttgtgccggagcagtgcgaacgcatgcggatccacgcaggtcatcaggtgtccggcagggccgaaatccagccagaagtggctgcccagcgtccgttccgcgcgccgcagcaggcgcggcaggtcgcagacgatggcgggaagatgcccgaccagggggaaagcgccgggcatgacggggatgtcgtaccgcagccggtgccgacggtttagggggttgagcagcacgttcatcagcagcgcgccgtttcggcggtgtcgcccgcagtccgcccggcgcagctgttgccaccgtcggcgtacgtcggcatatgcgccagcatgccgccgtcgatgcacacgacctggccggtgatgaacgaagcatcgtcggagagcaggaacgccaccagcgcggccacgtcctcggggtggccgacgcgcggcaggagctggtgccggctgagatgccgttgcatgcacttgtccagcttggccaggagacgctcggtcatgatgagacccggcgcaaccgcgttgcagcggatctgcgcatggccgtactgggtggcgagcgaggccgacagcatgttcatcgccgccttcgacacggcgtatgacgtctgcgcggtgtcaccgctgagcccctggcacgacgacatgttgacgatcgcgccaccgccgcgggcgatcatccgtgggatggcctgtcggcagcagagcagcgtgccgcgcagattggtcgccatggtctgatcccagaccgccaggtccaggtcgaggatcgcgcggtcgcgcggggtcagatgcatggcgctcgcgttgttcaccagcaggtcgaccccaccgaagtgccgctccgccgtctcgaacagcgctgccactgcctgcgcatcggcgatgtccatggccatggccagcgcattgcccgcttcggccgcgatctgcgcggtgcaggcgatggccgccgagccatcaaggtcggccaccaccactctgccgccctcgcgcgcgatggcgagggcacatgccttgccgatgccggcgccggcgccggtcaccacggccaccttgccttcaaaccgttccatcgtgtcctcctggaatgcgttggtctttcgccgcatgccgctcggcctccgccggagaacgcgcagggtcggcgctggcgcgctcgtcatcgccagcgtcgctttcgatgacccgaatggcggcgaccgggcactggctggccgcgagccgcacggcggcgtgcagcgcctgcggtaccgtcgccacgcacacttcggccacgccgtccggttcgcgctggcgaaaggtgcccggcagcgtcagcacgcactgcccagtggttccgcacagatcttggtcaatcacgacgcgcatctcagcccttgtacccttttcatgcggttctacggttgcgccctgcgatcagtcgccgaccgcctctcgccgtcgccatgctcaaaactggcaccaccttcgacccctctctggccgttcaaaaatgcgcttgttaaacggggggagtccccctgagcatgcagccgcaccggcagcgcgcggaacgtcctaaggaacgcggagggctcccgggtcggctgctcggccactgtcagcgtggggaagcgcgcctggattcgcggcaggctctcggccaactgcacccgggccagttgcgcaccgaggcagaagtggatgccgtggccgaagctaagcatgatcttcccgtcggtcgacatgccaggactggtgccgtagaaccgagcgggatcgaagcggtcgggatcggcgaaggcgtccgggtcgcgattgccggccgcgatcagcacgcgcacgtccgcgttcttcgggatcaccacgccgctcagttcgatgtcgctctgggcaatacgcggaatggagctgaacatggcgggggcgtcgcagcgcaggacctcttcgacgaatgcctccacccccgcggcgtctccctgcagccagtgccgctggtcgggatacgccagcatcgccaggacggcatggtcgatggtcgcagcagtggtggcgaagccgcccagcagcatgccccacagcatgctgatcaactccgcatccgatagcgtgtcggcatcgtcgtcgtgtgcgccgaccagcgtggccacaatgtcgtggcggggatcgatgcacttgcgctgtatcaggtcgccgaagtaggccttcatcctggcgctggccgcgtctgccgcggcgagctggggatcgctggcgtgcgggctcaggccttccagaatggcgccgatgccggcggcgaggccgaacatgtcgtcctgtggcatgccgaacagttcggcgaagaccagcatgggcaaggccagcgcgaattgccgatgcaggtccaccgcctccccgcgctccagcgcgggcgccatgccgtccaggcgcgctgcgacgaagcgcgcgatgctcggccgcaggttgtcgatctcgcgcatggtgaaatcgcgcgagatcagccggcgcagacgcgtatgcgtcggtggttccttcatcgctagcgtggacgccagcagattgagcgacaggctggtcgccgcacgcgggaaatagcgcgccagttcgcccggcgccggtccccgaaacgcgtcgcccgtggccttgagcgcccagcagatgtcggcgtggcggctcaacagaaagaggcccgacgccgcgcgatgcaccggatcgtgctcgcgcaaccagcgcatgaacggatacgggtcgtcgatgcaggctggcgacgccagttcggcaaaggcgtccgcgcatgctgtcgtggtttcttgcatgtccatcttggttacctgtcggctggctgatctgacaggcgcgccaggcgcgcctgcaaattgcggagaagatcgcgattcccggcggcgtccgcgcatcaccagagcaccgggaactcctcgaatccgccagtgatgatctccttgcgcaacttcagttcttcgggcgccacggccaggcgcagcgcgggaaagcgctggaagatcgaaccgaacaccaccttgagttccagcctggccagcgccatgcctatgcagtagtgcggcccgtaggaaaacgccaggtgcggctttgcgtcgcgtccgatgtcgaagatttcagggtcctcgaaatggcgtggatcgaacgatgtcgccggcaggccgaccagcaccttgctctccgcgggaatatgcacgcccgcgatggtcacgtcggtcctcggatagcgcatgatgccgtcccagcccgcgcccggcgggtacatgcgcaggatttcctccaccgccttgtccaccagggatggattgccgaccagacgttcgcgctgttgcggatggcgcaacatggccaggaggccgaattcgatctgcgcgacggtgctctcgtgtcctgccaccagcatgcccgccgcgaggccgatcgcctcttcctcggtcgcctcgccccggtcgaccgccgcgagcagatccgtcagcaggttgtcgcccggatcctggcgcttgtcccgcatcttgccgcgaatgtaggcgcgcagttcttcccaggccaggcgcgacgcgctgcgcgggccgctttcatgctggtgcgtcatcacctcgtcggacagcccggcaaaaaaggcgtgatcctcgtagagcacgcccatcagcgcgctgatgaccatggccggaagcggaaaggagaggtggcgccgcaggtcggcgggctggggctgggccgccagagtctcgaacaactgcgctgcgatcgcctcgacttgctgcgcgagcagcttcaccctgcggtcgctgaaggccggcgcaacgatcgtgcgtaaccgggcatgctcgcccccttcgtgcgagaccagccaccccggcgaaccgagaatcacacaatccggggtgaatgccgccggcggcattcccgcaggccggaacgccgcgtcggacagcaccgccttcgcctcgtcgtagcctgtcacccaccagccttcgtgcccccgcgggaagcgcacgttgtgaatcggaccgttggcgcgtagcgccaacatcgtgggcgagggctcgatgtgatcaacccgccacatcggcagcgtcggcaagggttgttcgggcatggtggcactccactctctaagcgatggaagggcatgccggcgtgtgccgccgtacaactagggcagcaagaaccgcgccaactgcgcagagagcgcctcaggtacactgctctgcagatcattcaatgtcttaactgagcgcggcacgcccgggccgaacatcaccatgtcgcggacgcgacaaacccgacagtagatcgacgcaaagtatgtgggtcgccttaccttggcgcagaagtcagggttcgtctgtcacgcatgatcggacctccagtaaagcgttcacgctatcgtttggtagctaatcatgaggatgcggctgtttcgccttagttcggcagggtaagttgcgaatgaagctcaaacgaaatttgccgacgacagggttttttgcttccagctcatcatcaccgaaaatcctccgctgacgtaactgatcttcctgcctttcgacgggttccacttgccgagactgacgaccgttgcggaattgtgcgtggagcccgtcgcgcagaaagaccgacggaaagtatgacaagggtggccaggcgaaaagtggagcgcgcaggccacatccgatacagggcgctgcgcttcaaatagtcacttgcgttcatgcgtcctctccttcgcgtcaattgcgacggagagaccctacgctatgccgattaggctaccgctatgctaccgaaaacgttggcaaaaacttgcttaatcggcatagttggacggtcggcataaacggccaaaatgaatgccgtcgatccgctcgacgggctctcgcagaccttgaatcgcattgctcaaggctggccagcatccgaaattgaagccctcatgccctgcacttcaagcctgacgttatcggctgaccgcttacgtcgaagggcaggtcatggcggaagaactcttcgccgcagagatactggaaatacgggttttccacccaacgggcgcacagctcctcgtccgacaggttgaacgtatgcttgaggatcgccagcccggccatcagccgcgttggcggtggtggcatgccggggtcggaatagaccgcgccgaagcgccgctccaaaagcggctagtcgatcgcctgcgccagccgcaccagttcgagcgtcatgttgatgatctgatccagacgggcatggaacaggtcctgctctcccgtatcgcgccgctcgcgtggtcttgacatcgccgctcctcgattcaccgccgctagtacgagtgaatcacgccgcgccgaagcagaaaaccgcaaaatcatattgcaagaaaagcggactcagcgagagcctttcggcaacactgcgtcacaggaaagcgaagaattaccgcagagaggcgtgggatagttcacggacgactcctcaagagtagttgcaaattacggctatccacgcgcggagaaatcgtctgctgtccgttctaatagcaaaacttcagacaaccggctttagaggtgcttgacgtttaacgatccgccccacttgtcatttaagtattcgcataccaatcgcctatgacagttatgggggtagcctctgaacaaagcaagcacgtgccctcaaacatctcgggcttgaggcgattctcaatttgtcgcgttgccattaagcgcatgaattgcccctcgtagactttccagtcgcctttgtctcgcttctaagccttcaaaatatcatcggtaggagccaaaaggggctgatgcacgtactgggcgccgcatatctctgttaggaagtatgccaggtcatcagccttcgcgaaccctgcgagctgaaaacggcaacatagccgaggtcctgcagcatcgcagcaaggaccgaacccaacaccggcccatcgccatcgtggggagttcccagggcatgggcggcagcaaaagccgcgccgcatcgctcgccaggctgtctttcgcaactccgcgcctgcgagacgattgcctgcgaggcggcgagcgcttcacgcaacttccggccggcaaagaccttcttattgaggagcggcgtgggccagcccaagaccagagggcagagggtctcgaagatccgctcggctaacaggcctgcccctgcggccatgcgctcctcgtcgctcgtcggcatgtccgtcgcattgaggacggcaattctggacgcaagcgattgcgaaaaactgcaaagcgaaaagacccgtcccgccagtgcgggcgcctcctcgcctgcggccgacgaacatgcgggcgagccgccgcggccggttcggcgaccgaacaagcgagcgcacgcgacactgtagcgtcgatccgtatcgtgcctgcaccgacgagatagctcatttcatcatgctcctcgttctaacggaatttgccgcgaaacaggtcgcggcgattgagaggagccgtaggggccgggggcggttcgatcgcggacggatcgaagaaggcccgtatggtctgctcggcggtttccagcgccgcctccgtcgtggcgaattcgaagaccggcgaaaacagtgaacagagatcgacacgcccgatcgtatcgagctcgccggcgttgaagcgaccgaacggggagcgggaaaaacacaaacagacatcttgtcacgcagatgcgaagcgtcccatagttcgcgcagcaaaagggggagacatgccgagcgtctttttttcatattcgcacgcagatgaggggctgagggatcagctcgaaaaacagctgtcgatgctcaaacgacagggcgtgattgagacctggcacgaccggcgcatcggcgccggcgaagatatccatcgtgcgattgacgatcacatcaatacggacgacatcatcctgctgctcgtcagcgccgacttcatcgcatcggattactgttacgacatcgaaatgcagcgtgcgatggagcgccaccacagcggcgaagccatcgtcattcccatcattcttcgggcatgcgactggcaccacgcgccgtttggaaagctgaatgcggttcctcgggacggcaaaccgatcacgcaatggccggatatcgacgaggcctttctgcaagtcgccaaggccgtgcgcgaagcagcagggcgggtaacccgaacggcctcggctccgcctgcacgggccgctgcggctgcgacgcctgcggcgtcgccggctcctcaatccctcggcccgcggtcgagcaatctgcggctcgcgaagagcttcacccaaagggacaaggaccagttcagacacgacacgttcgaatacattgcgcgtttcttcgagaactcccttaaggagcttggcgagcgaaacgccggtttcgagggcgttttccgacgggtcgacgcgaacaggttcttcgccaccatctaccgcgacggcaaggatgtgtcacggggcaccgcctatctgggtggggagacgtggggacgaggcatcaattacgttcacggtgagacgaccagcagcaatagctcgaatgagtccctgaacgtcgaggccgacgatcagacgctcttcttgacaagtatgggcatggcgtcgtttgggcgggatcgcgatcagaaactttcacaagaaggggccgccgaactgctatgggcgatccttatcgcccctcttcaggggacgcgctattaagggaaagcatatgctgtcaccgagtgaattcacgatcggcacgctggggagcgccgcgcctctcagccttattctgccacgaacgaaatacgaggcgaccatgctggtcggccatgtcgacaaagcgcctgcggctgtctttctttcaggagagtttgctttccattactttccgagtacggacaatgacagttggcgaggccttattgttccgggcgtccgcgtagaggtggacgagaccagtgtcttcgatcagggccaaaccatggctcccttgggcgcggctatccgaatcgatacgcgtcttgccatacgggcaaagagcgagcattcactcagcggatcatccgcccttacgattcacgataagctggtatcggccggagaccttcgcgcggggttcacaaggtggcagatcgtcatcggggaaggacagacgaagcgggtgctctggcaaagatccgacgaagacgaagccgctaaatcatccgcctgatttcggccgccaacggcgccaggtcgccgctgaagctccggatcatggcgtccagaaaccgcttcggctccagcttgctctcgtcgagctcgtatcccgcatagcgagtgagcatcgtcaggaagaccagttgggtgcggccgttgccttcgcgaaatggatgaatcgcgttgatctccgcgagaaaccagcttgcgcctttggcgaaggcctccttgctttccgtcctggcaaggtggtcgcgagcggcaagttcggcaaataggcgattggcttccctttcgatatattccggatagcaaaaccagttctcacccttgccggtgcggataatccgtgtttgcccggcccattcataaacgtcctgaaagaagtgtcggtgtaacgcgcgatagtgggcgaaatccagatcgccgtccggaagcgcttcccgcgcacgggaatcgaacatcaattgctcgaactcatccagctcattctgatccgggatattcgccctgttgcgcagcacatgggtgccgggatagcacagcggatcttcgacggcattgtaacggaccacccgtcagcccttcttaaaggccttgacgatctcgctacggtaggcgtcacccttgaggccgctcgcggtcagcttctccgaaagcgcctttgacgcggcattcatcttcaagccttcgacctgggcgaatttcgcggccttcttgccgccgatgggctgcgtcacgaacttgcctgtcacggccgagcgggctgttttcgtatcctttttcatgactcaccttaccatcgacgcggaacggttgcctacttctttatggcctgcccaggaacaggtcctgccaactgccttggccggtattccgcctctctcctgttctttccgacgcagaacacggcatgcgtgagggaaaggggaattgccgagaaatccgtctgtcaccggcggctcactcgatcttcgatcgaaggcttgttctcacccccatgggattttcgtctggagcctcggacgggtcacgccgtgttcccgccctggtcaatgcccgtacccccgctggccggattggcgccaaactgggctgatccctgccgcgctcaatggaccttccgccgcaagcggtctcccgagaacgccattgcccgcgccccgtggtgatcattcggcgaccggccgcagaggtggccggatcaacgaagagaaaaacaccaatggcgaataccaacacacctaagtcacccacgaatcttccatgtcgtcggcgagaaggacaaggcccgctgaaccaagatcggtcggctggcagcacggcgatagcgacggactcaacctcgttaatactacaccccactggtcgcaagccgtatggtcgcgcgcaggatcaaaacgcaggagcccgatgtatgagcacggccggtttcagcgggctggcggagtcaacgaacttcgccaatatcaacgccatcgggtctacttcaccgattttgaggattatcaaacaaaagtcgctaccgccgtttatgctttcggtcagccaatcgaggagctcgagctgcaatacatcgacggcgagttttcccgcctgttcgaggccgtccgcgtctctcaagccagcctgatcgcttggtttgacctgcttgaagcgctcggtggcgacgaagaccgccacctgatcgcccgccaccttgccggtttgggcaatgcggtcgacgagcttgccgaccgctgcgatgattacacgctgttcggtgggaccgcggcagactacgtggctgaaatcgtcgagaaatgctacgacgtttcgatgcttcggaatttcgtttgatcgagaacctgtgcccggttgcgagtgacctcgccacgctcggcaacgccgtagcggcattgtcgcgtttcacgacattcggcttgccgatcttctcggcccaccagcgcaaccagctggtagttttgacgctctggctatcgatgaccagccgtcgggcttgcctctttgccctccaactcccgggcttctatgacgagacgatggttgatgcgtggccaaagtccaagcaccctccaaggcccggatgctagcgctgaaaactgccttgtcgccgtctccgacgccggttcaatgggcggtggagacgatagcgggtatcgcgaccgccagcgccgcctccgaacgcacctggtgttttgcggtgcgatcccggcgcggtagctgtcgtcttcatgcctccgagtgaaggggcgtgagtgtgcacggaacgaagcatcacgatcgtggttcggagcttgcagttttgcaagtctacccgaccaggcggtgcctgcctgctcactcggaagcggagaaataccgatggcgcacggtacgaagcaaaagctgatgaaggcaagcgacatcccagcgttcgtgaatgaagtcatcgaggccggatgtgacatctgcgccgttggccacgaaaaatacgttattggagataccgacctgtcacggggcgcctatggaaaaatgagacagaggctgggtaggatcgaagaagcgtacggcgatcgtgatttcctcaaactcgaaatcgtcgcttacctgcgctcaattggcagatatgtcgacgtcggcgcagacggatctgaatagaaagcgcgccacatgctcccgcagatgtgcggcgaaatgccgggtagagcgttagtctaatggtccaattgccggagcatcttcgaagccgccgcccgtgaagccgccgcttcggttttctgatagcggtctgtttcgtcctgcccgatcaattccgccgaacggttaccgggcaatctcggccgcactgggcgcccgccgcgagatgatagtcgatgtgacgagcggccttgcgtgcatcatcgctcggctgcggaaatctcgctgcgagatttaaggagtgccattgcctgtgaagcgggcagggggccgccaaacagataaccctgcgcctcatcgaagccttcggcctttatcgtgtcgagctggtcctggcgctcgacgccttccactgtggtgataataccgagtgagcggccgatggcggccaccgccctgacaattgccagggattccttgctcttcggcagatcggcgatgaagctccgatcgaccttgattttatcgaagggaaaggttctgagataactcagcgatgagtagccggtcccaaaatcgtcgatggcgactatcacaccgagctgccggatctccttcagcgtctgaagattactgtcgcattcctcgagcaacaccgactcggtgatctcgagctgcaggcgcgaggcgtccagccccgtgtcttccaaactgttgcggaccgtcgaggcgagcctctggttcctgaattgcagcggtgaaagattgaccgccacactgacataggggggccacttgacggcctcggtacaagcctgacgaaggatccactcgccaagcgggccaatcaggccggtttcctcggcaaccgcaatgaactctgcaggagacacctgccctctctccggatgtggccaccgggccagcgcctcaaatgtcgtgatctggcctgtgcgaaggttggccagcggctggtagcggacttccagctcgccctttgcgagcgcgtgccgcagtgaaaccttcatccgctgtcttgcccgaagatcagcgtccattttgggctcgtactgaacgattgtgccaccgccgccggttttggcccgttcaagcgctatatcggcggtcttgataagctcgtctaacgactggtcactcttcgaagccgcggcaagtccgacaactacctgaagatcgacatgcgtccctgcgagttcatagggtgcttcgatcacatcgatgagctgctgcgccaataaacgagcctcagcattgctgttgatgccaacgcgcaagacgacaaattcgtcgccactgaggcgacagaggatgtcggattgcttgagaaaatttctgagccgctcagtcacatggcgcagcagcaggtcgccggtggctcgcccataagcgtcattgatcgccttgaagccatcgagatcaaggcagagaattgccagcctcgtgctcggcgcaatatggtccgacaggcgctcgaactcctcgcgcaggaactggcggtttggcaagcctgtcaacgcatcatgccgcgccatgtggtgaatttgcttctgcgccagcaatcgctcctgttcggcgttacggcgctcggtgatgtcgagcgcaatgccaacgaagccgagaaacgttccgtcgcttgcgaagcggggctgtcctatgtcgatgacccaggccgagcctccgccggcacgcttcagacgatattccatccggactggctcgcgaaggtcgaaggcctggtaaaatactctttcgacagcgttccggtcatcgggatggacggcattcaaccagcctttccccgccgcctgctcggcggtctgtccggttgtctcgagccagaggcgactgtggtagtcgtcggcgccgttttcgccggtcacccagatcatcaccggcgcgtcgtcggcgattgcccggaaacgggcttcgctctccttcagggcttcgaacatcttgcggcgatcatcgatgtcctcgactgtgccgtaccatcgaaggatgcttccgtcttcggctctgcgtgtggcggcacgactgcgataccaactgtagcctccctccgcagccgccaggcgaaactccacatcgagcggctctccggttgcaagcgatttcgcccactctcgctgaacctcgcccaggtcatcagggtgcatcgccttcgcccatcctgctccgagagcttcctttggggcatagcctgttttctcccagcgcggaccgatttccaggacctcgcccgatggatccgctgtccatggcacttgcggatgcagttccgtcagcgatcgatgatgctcgacgctcgcctgaagcgccgcttccgccgttcggcactcggtgacatccagggcgatcgccacaataaccttttcgcttgagctccctctcgtcaggatggcacgactcttccgagttacaaggcgccttacttctccgcccggtacggcaatcggctcctcgacggagacctcctccccggtagaaagcacgccaatgtccatgtcccgatagcgatcggcctctgccgtcggaagaatgtcgtaatccgtgtggccgatcaggtcgcatcgtgctctgccgacaagcatgcacgcggcatcattgaggaagagaaagcggaaatgctcgtccttgacgatgatgggctgtgggatcgcgttgaggattgcctcaaaatcggcgtcgaaagtcaactggttctcgaatgaagtccgttgcatcgtagggctcggtgttggagaggtaagttaatgatgtcggtcccggccgaggcgggccttaacaatcgttcagatgcgaaatggcgcatagacgccgcgtcaaacaccctagagtagcagcggttaacaataaataggccctgtcggctcgaagctgggattttggccaagttgaataacgttgtgggaacactgccgcggtgattgacgtgtgatttgtcggggaacgacatttcgctccgatttatggagtggagtggcgagtttgagcctttcgcatgaagatttggtcagccgctggagcctgagtttttccgatatagaatttgtaaccggcaagtcggtatcggcgcgccttgggctggcggcgcagctgaagtttttcatgacctacggccttttcgtacaggatcgcagcgcaatccctgccgatggtctctcatacctggccgagcagcttggatttgatgacgataccccgagcgaatacgattttggtggtcgtaccgcgcgccggcattgataagcgaagcgtcctcaaggccgggctttatcactgcgcccgctgatcctgtcggtgaatatcctcgagcatcccgccgctttgagagcgcgctgttgcatatcgaggttctgtcagcaatgaatattgaaaagcttctcggcggcttcgctaacgtcgccgccatccttacacctctggtcgcggttctcgcttatagtcgctttctttgggagcggcgtcagaagcgcttgcgcctggagagctatttgcgcgaacagaaattattcgagtgcactggccagcattcgttcctgcacttggtcgccactctcggaatgttcgaagccgatatcatggatgcgtcgtaccgcagcaaggttatcagtcgcaacgtcgccgtagatgttgcgggagagcctgtgaggatcgtccttgaatacgagccagacgacttggaaaaggaattacccaagcggcctggccgcggacagttctaaaaggaaaaacggttcgtgacgtcaatcagaccatctgttttcaaccaacgggtaacgcccgaaggcggaccatttctgcatttctacgatcatggcgaaacagcggaaacgcttgacgtttacttcagtgacgtgaatcccgagggggaggaacaccagagcagactgctcctccgagtgtgtccagaagctatagtgatgtggccgattaacgttgggcggggtagccaaaactacttagagcccaaatatgcctctctcaccgatatctggattcctcgtccggcctccggcccatatcgattgccgaagacgtctgaagacgtagacgaacttttagatcgccgcctcccgaatggttttgagacaaacgggcgactcggcttactcctgtacaaatatcgatcgatttgccgctccatcgcaggcattgacggtatcaccactctggttgttcatggccaaagcggagaaagggacgcaattatacgccccctagaatacgttctcggcaccaagcggtttcatgccctgaagcgcgaattgaccaggaccacgaatcgtttccgccgcgaggccagaaacgcgaggcaggaccgtatttacgaagctcttttgcattcagcggatcgcgaacgcttccctcggaaaaccagaagaaccaaaccggatgccatctccgagctcactcagggaggcgcgaccgacgggatatcgaagcgagatcgacgcaccgccgtccgactcgtacgacagagcgttaacactctggccaaagacgagccccatgtattgctggcgctatagagcaagattgagctcattacgctgaagggactgattgaccgatttaacgaaatgctcgcaaaggagttgcccgaatcgagatggcaagcgttcctttaagataatcccttcattctcagcatggcgttttccgcgccggcgatcatgatccaggataatgcttacgtcggcggtaagcgcttcaatggtagcaacggcaaatttgccgatttcctgatggcgaccgcttcgacaggcaatcgtaaccatccggcgaagtcatcaccggaggggtacaggcaatctggccctgatcgaaatcaagaggccccaaatcgacttgctgaccaagagcgcctatcgagggactgatgtctacggcccatcggccgagttgaacggagccatatatcaggttctggactagcgattccggcttcatcagaatctgcccatcttcaaggacgaaactgaacggaatgacattcatgtcattttgcagttaatcgtaagactcagatatagcgatatcaacgacttgacccggcacataaatcgagaataggcaattaaattgagaatcccacgggattttggtacttaatctgcgaaccgccgcgattactaaaatggcgattttggctgaagtccgcttccgcgtatcattcgtttgaatcgaggctcagcgccacgttgcgctccgaatgagcgatcgcactttattatctgtcatggtgaaatgctcacagatggcgcaactcagtcgaaacaaggcttcggatacgcactgaatgcaagcagaaccaaaagctgccgcatcggaagccggagaaatcctatgagtcatcgtgcaatgtctggtttagtatggtctcggatcttggtggccctcgacgtttcgatagatgcgctgtatcggcgggagtctcgctggacagcgaagcctttgaggcgttcggctaatgattcggttttgggatcgcgcctgctggtgctcaagtctgtctcgttgatgccaggttggtggcctgcaatctcgtcaattacactgctggagtgagagtgcttgtaaaaggtcgctgggaggaacctctccccatgaaaaaggcttatttgcgcatattccagcatggcgtcggggcatgtagtcactggagtagtcaccttcgtgggctatcgttccatggtggtgtagattgtcatgccaggcatcgaacgtcggtaattctcgatatgcggccagtgcaaattgtactccgaacatcacgcagtcagccgcagacttctgcgcgccaacctcaataaaagcccacttcgcctgcgttcccaactgccgaaacgaatccccccgcaatttgaaatacgaggcgacaaaggtgtaaaagttggctccctccatcacgataatggtgggtgctgctcccgcgcgtgtccgaacatcagcggcgacgtggtgctgctcgccgtccgccaaccgcacgacagcacgccaggcaccgtccgatgagcggtcattcagcgcgtcgaaaaatctagcaggcgagtccatgtgtctaaggtcaaggtccgggtagcgccggttgtagctggccgccaagagaggaagattcctgatgtccaacgataaaattttctcgtcaggctgtacgttggcagacaaatggcgtgctacctgccgaccgtattccatcagactggatgacatcccagcccgcctggcatgctcaagtgcttggccaagcaactcgactttctcgttgattcggggtgagagattacggctcgacggatttccaatctcggcccgccgagataattgcaacgaatgctggccttcaagatggggttgaggtggacttgatcgtgcggcctcaacgtaagcagcaaactaggtttcttggccgtgtccatagtcctgatggctctggcgccgtacgctcagccgggaaatgcaaccacccatatgcaagctcctgtgatacgtgtttacccgatctggctcttcaaaaaaattcatccgcgaaaacggattaaggagtcgcgatcgcatgcaaccgactaaccgcattcatgatcttccggcattaaacttgcacggcctcaccgtgatgcagtccgctaagatgcggctcaaaagttcgctgacgcgcctgctgcaacggcatggtgcagaatggcgaaatctggaccatccaaagggttgatatcatcaaataggcagtcccaattcgttggcgtggtgacgttcgcagatctgcgtatttggatcgctacgttctccaagttaactgaattagctttcgagaagctgacggctgaactggctgctgggccgtgggcttcgtgcagccgctggagcctgagtttttccgatatagaatttgtaaccggcaagccggtatcggcgcgccttgggctggcggcgcagctgaagtttttcatgacttacggctttctcgtacaggatcgcagcgcaatccctgccgatggtctctcatacctggccgagtagcttggatttgatgacgataccccgagcaacatcgccatcgcctcgatcgacgaaccggcggggcgggtctgcgatgttatcttccaaacgcgacactgtcgatccgcaatgcggacgtctggggtgatgcggggacggcatgcgcctccgattcgacgaagttcggcgcatgggaccgcaatctgatgacggaatggcatgcccgctacggaggccggggtgtgatgatctattggcatgtcgaacggcgggcaacctgcgtctattcgcagctcaagcgatgctcgtcctcggaggttgccgcgatgatcgacggcgtgctgcgccattgcaccgacatggaagtccagcgtcagtacgtcgatagccacagccaaagcgccgtcggcttcgccttttgccgacttctcggctttgagctcgccccacgcctgaaggcaatcgcccggcagaagctcgcgcttccggatgcaggcatgcggacgcggctaccgaacctcctgccgatcctttccagcgtgatcagctgggaagagatcgagcagcaatatgacgagatggtcaaatacaccgccgccatgcagaccagaacggcggacccggaggccatcctgcggcggtttgcccgcgccgaggtgatgcatcccacctacaaagcgttgagcgagctcggccgcgcggtcaagacgatattcctgtgccgctatcttcgccaggaatcgttccgtcgagaaatccacgaggggctgaatgtcgtcgagaactggaacagcgcgaatggctttgtgttcttcggcaagggcggcgagattgccaccaaccgggtcgaacaggaaatctccgccctggctttgcacctgctgcaagcttcactggtctacgtgaacacacgcatgcttcagaccatgctggcggaaccgaaatgggccggccggatggcaccggaagactatcgcggcctcacgcccctcatctatagtcacgtcaatccttatggccgtttcgatctcgacttgaatagtcggatcgactttgatcagcttgcggcataatttttggagacgataatggtcaagattgctgaagcatgcctgaatgttctctaccagcacgggttgtcgtcggcacagttccaattttggttcgagagagcaaagcatgatctcttggccgatggcatggcctgcgacgccattgttgctgaggttatgcagtccatggacgatcatccggacgcggcaaccttgttcgggttgctgctggatgaggcccgaatgggcatcgagaatgacagcccatatggaaaggccttcctggaaaatgcggagaaggcgatcagagctcgcattgccgccgacgctttcgaaccgcttcaccgcttgaaaatcgctggcttgtatcggcgtgccggtctgcccgtgccagacatactgatgcttgatccggagggggaaggtgccgccgatgagatcgcgatgccggatcttggtggcgtgcttgccgttttagcggcagaggttgaggctgaaggcggcggcgcgtatgagttcttcagtggcctggatgagatgacggcaggaatgccggagggggccaaagctgggtttattcatcatcttatgagcctcgataatccctttttggaacgctgcgcgctgtattggctggtgtctggtgcagcattgacccgggaggccgtggctgacggcctacgagaaaggctcatgcgcggggagctgcagcctgaaactgcatcctatttgccgattattcgtggctggttgccggcgagtgccgcccgggcggctatcgatgacatcggcaagctgtctcggcgacaaggtcttgcagatgcttccaatcaaaacagagcggagccgattgtcagcgacatcatggcgaccaccgctgacggtgttggagcacaaggcctgacgattgtcggaaaactacaagcccggacatttgtcgcgatgatcctgttaaagaccggatacggcatcaaggatgcctttgtcattcgttgccgttcaaagagcgaagcaaccaacatcgtctcttatgcccgccaggaagcaaacagcgtcaaaatagatcgaatgactgccgaactgctgctggaggcggctctggcggatgggatgaaaaacggccacccaccagcgccaggcttcattgacgtcatagaggcttgcagcctgagccaattgcggccccaggaaagggatctgcaggctttgctggaacacgtcgatccgcaaaaggaaatccagaatgcgacagcggcagagctgaatcggatgctccgcaatgcgtccgcactggatgcgctcgtcccgttcaccgacagctggtttgaagacacaggagaaacacgcggcatcatccagggatctcgctcagtgcggactgttgaaaaaaggatctgggcctttctcgaaggccggcgagacatttgggcgaggcgatttctgcaaaccgcgatcattctcaaatcggctaagaaggagcgaatgtcaaaagcactggcagccgcagccttcgccgtgatgcacaagcatcctctacaggacatcccgcttatgaaagatatcgctatgaccacactggacgcaggcggtggatctccgtggtgagtattttgcgtatacccatcgtgaacttcgccaatgaacagttcgaggctgtggattcctatttattttgggtcccgactgagatatcgaacaaatcgacgcgatggcacacgcaaattgaacagtttgcatggtataggacatggctcgtatcggatatgcccggacatttacaacagaccagaaccttgcggcgcaaatcgccgcgctcaggaacgccggctgcgaggtcatccgcgaggagcagaaaagcggtgcatcgctcgaaggtcggccgcaactgatgaccattctcgacttcatccatgccggcgaaacctttgtcatcacccgtatcgaccggctggccagatctctgcgcgatcttcaggtgatcgtcgaccggctcaaggccaagggcgcgcatctggttgccactgagcaacccgccgatacctccacagccgccgggaaggcgttcttcgacatgctcggcgtcttcgcggggttcgaaaccaacctgcggcgcgagcggcaggctgagggtattgccgctgccaggaaacgtggcatctacaaaggccgccccccgaagattgaccgcgcagaaatcctgcttcggctgcaacagggccaaggccccagcaagatcgctcgcgatctcggcatatcgcgcggcacggtctatcaggtgcgcaaaggtgttttcgaatgagcaaggccatccgcatcgcccgtttgacatccgccacctgcgagcaaatccaggcccgcatgcttgaggcttgcaggcagatcgcttcagatcacggcctggtcatcgaaagcgccgggtggcgcggcctggagcctggcttctcgttcgaacctgcattccgcatcagcattcccgcgccagatggcaagcccctcaatctggatagggagatgttcgccgtgttggccgaacagtacggtctggaggctgctgacttcgaacgcgagtttatcgctggcggcgaacgcttccggatcaccggcattgatccgcgccggccgaaataccctatatccgtcgagcgtattcccgatcacaggggcttcaagttcaccgctgacaacgttgccatgctgctcaaagctcaggccaaaccctgacgttcaccaatcgttcttcaacttggccaaaatcacagcttcgagccgacggggccaaatagcgggcgcatgtcgaaagaacgcatctcgaatcgaaaaagtgacgggaattgcgccagatcaaatgaaggttaaaagtacgaggttgatatgcgaagagctggcgcaaggaggaacgccatggcacatcatcgcaattggcggtcccggttcgatgcagttcttgttcgggcgctaaaaaatgctgttacgccgagcgatccggcgaaggcgacaccgcaagccaccgcgtcaggatttgatccacctccggcggggagtgacccgggagtcccctatcttttgctcatgcggatggaggtgcttcagctcgatcccacccgagtcaaagccttgatgccagccgactttcgcgtgctggctcacgtttgtgactattgtcaaggtgcgagcgggatcttctctacttcgcagctggcaaaccgactgtctatccgttgagagcgatgggtttacttcaaacagttcgccccgatcgacgcgtggcgaccgcctagggccagcaactggttagcagggcggtgcgccggccatgtgctcgcctccgccgaacgacctcgatagaagtgccagtatgaagtctcactggatcattgtgccgtcatggtgggccagaggtcttagagaccgcagagaggcgcgccaaatgatccgagcgacggcaatgtcggcaatccaccgcagcagatgcaagtgccacgctgcacctacaaggcacgcccgccggtcatgagacgaagccagcgacgaaggttatcaacaaaaatcgggcattgtttggtgctctctaacggtacgcacatcctgcgggcgcgcccttcatcgcctatttggaaaacttccggatccctcgaagaagcgacttgagttccggttcgtctactgcgccggctgcttcctctggcgagaaccaatgaagttcgcgttgccccctctccggatagtctcgtttgagctccgagacatttagcaagtgaacttggacgagagcgggcgctattcctgatcccttcagttttttgacataggtgtagtatccgagaggtttccttttcacctggccccgaactccggcttcttcccaggcttcttgtcgggcaatctcgtggggctttttcctgggcatactccagcctttgggaatgacccagcggcgactgtctcggctggtgatgagcagaacctgaacatcgttctctgctcccggattcggcctcacacaggcagcggcgtattgagccatgaccttacaccttcatcagcttggataaagcggaacggttcgtactgtcagccggcatcactcagcccgattccgattagcatcccgtcgaggattgggtgttcgaaggagacgatgtgagcgttgatgcgcataagatcgcgcagcatgtcgagatgcaacgaactcgtctgaaggctgtaggcgcgaccatcgcacaagcgttccagatgtggctcctaccattgtttctccctttctgcgaacctcgacgcggcgataaagaacgattgcggcgaggatcaccaacggcgacagccattcgactgccggtcgcgacaatccaggcagtgaccgcggtcccggtattggcgccgagcagcacaatttcgccatgcgcggcttgaccagttcacgctcgacgaaagatgcggccaccaaggccgttgccgttgatctctgcagcacgactgtcacgaccagccaaatccgccgttggtgccgttcgggaacccagtttggagcttcgctccaaagaggctagacacgcctttcacctgcgcaaggctgaatagcggcaagggctacagcgccgaaaaaaaccagtacgagaatcgtaagttccatgtctccctcacactgaacaaaaagcgctcagcgcatttttggactccagccagacgcagcatcccagtgggcgagcgtcgatccgcgtccgccgtcatggatcccgcacctccgaaaaggctgcgacgttcgatctcggggggatagcttggcagttcccgagaggatggtccgcgatgttcaagaaacgtgccaactgccaggaaggagctcggaagaacagttccgctacagttcaacggcttgcgctggagagtgcggcgtcgcgcgcctggccgaacattgtgtcgcgcacttcacaggaatagcgaacgggtcgccgtgttagcggcaacgcgcagatagtgcaaatccagccgccggcaagggccgctagcgccaccaagatgcaaatcgctccgatggattgcggcgactacgccccgcacgatacccgcctgtccggccggttgcatgccgatggcaaagggctcggcatgacgccttccgcgaaggaggcgttggcggggcgataggtgagggcggccggatgtactgcatagtaggcgagtatgccgtgcaccgaaggcctcgcccagaagcgcacggcagccgagcttgtaaatgccgagcttgtgggtctggcaggctgccacggacacggtcaccgacatgagcgatttgtggaaggtggcggatggccgcactcctgtaatagcctctgtcttagagtcatccggaggcgacaagcgtgtcgcagttgcgacatttcagtgcccgccgcgtctcgtcgggaaagattttagaaataggccaggcgggagtggtggttgattggccgttacacgtatttccaactgatggcccggccactgccttgcaaagtgcgtgacggcgcgactccttgatcgggcgccggcatcaggcgtcgggcgttgaaggcggccgggaagcgcggtcattgaggccagcttcgtccagcctgtctgtacttcaacgtgagccaaatctcagcttccagccgaaagcctccgtgcgacacattgccctctccgcgcgataaagcgtttcttcctgactacggttgatctcgatcaatatgccgccgctgcgcacagtctaccgttcgccttgcaacgattggttccgatccaacttatgctggttcaaggagaggtcagatgagcaggaatgatgcacggtatctgagatgtaccgcggcactgggtgcggctttcttcgcatgcggggcagccgcggcggagctgacatcaccgcctgttgccccggcgacagagggtgtagcggccgggctaagtccctggcagatccgcgtgcgcggtctgggcgtcctcactgaggacagtggctcaatcaacggcgtgcctggctcggacctttcctattcggactcgttgatcccggaactcgacatcagctacttcttcaccgacaatatcgccgctgaacttatccttggcacgacctatgccaacatcaaggaagttggcgcggtcggggttccggtcgggaaggcctggctgctgccaccgacgcttacgctgcagtaccatttcaccgacttcggcgccttcaagccctatctcggcgcggggatcaactactcgctgttctacaaccagagcgaaaaggcggggttccatgacctcgacgtcgacaatcatgtgggcgctgcgctgcaggtcggtttcgactacatggtcgacgagcattggggcgtgaacttcgatgtgaagaaaatcttcctcgaaaccgaatggaaggctgatcatgacgttctcggccccctgagcggcaaggcaaaaatcgatccgtggttgatcggcgcaggcgtgacctaccgtttctaatagaccattactgccggagagggagacgcaggcaccacccgtcgggcgcgtccccaattgtaaacggtctctatgcagaccctgaaggcgggtcacgtcgccctctgttccctggaaaatccagagtgacaggtgcaaaagatcgccgactccgtgcaatgtccgcggcgcttccgtcgcctccggatgtactctcgataaccggtggactttcgtcccgctgatgatccgttaaaagacaccgtttcgccggaaccgtacgtcagtcaacgatacccgactttgaaacgcattcatctacgcagtggatctttgctatccacacaaccgttttggcaatcttccgaacgccggtatagagagttgacttcaactggaggcaagggcgaatgtctattgcgagccgctgttagaggtggtctgattgtcgaactcactttcaggccatcggtctatgacgatccgccgaaccactgcgaatttgcccttttgtaggccaaggatgtgatgcgcgggaattccgatcatcgagatcgatccgaagcgcgcggccgcaggcggcgcaatcgcgcatgtcgctgctttgcgcgacgaacggctggcttgcctgcaaaagctcagaaaaaaaggccacgaagttcgtaagtctgcagtaaaggagtttcatttccatggttttttcattttccacgttcaatcggctcgtcaccttcaccgtcatggccgccatcgtcagcgtgcggcctttgacggcggaagacctgtcctcccagcagcagtggccgggaacccccttgtcacgagtggaagcccttgcggttcttcagactctaaacgcgaatctcctcagcaatgccagtgcgacgctcacgctcgatcgctggtgtgaagcgcatagacttgcaccacccggttcgaagatcgtagcaaaacatgtacagggacacgacaagccagctaacgttcatattcgtaaattgctgcacgtcgggcctaacgagccgatcgtctatcgccatgtccgcctagcatgcggtgatcgcatcctttcggaagcagacaactggtatgtacccgcaagattgacagcggagatgaacgaggtgctgaatacgactgatatctcgtttggtcgagccgttcgatccttgaacttcacccgaaccaacctaacggccagactgctttggtcccctcttccggaaggctgggacatgtcagccgaattaccagtgtcgagctcagggcccttgattccaccgccattccttctcgaacatcatgcggtgctaaagttgcaagatggcacgccttttagtgccgtggtcgaaagctatacgaacaatgtgctcgattttccggctccgctgctatatccgcaataaagcctagtggattggctggcgactcggcgttagcacggaatccgattgaagccggacgccattcggatcggacaccggacaggattcggattgtgccgagcagtttggagtgatgaggcctccgccaccggcgtcttaatcgttgagccgatcggaaggtgcgtgaatcagcgctcgcttgcaagtttcccacgcctgctcagcgaatagtcaagcgtgtccacgctgcgctcctgcccagtcctgacatttcgatctctgcctactgaacatcaatgaaaccacctttgcccccgctatcgacttcgcgaccgaacgctggagcgccgacggggtctttgaggcaagcggcagcgcgaatggcttcgaggggctcctcgatctggtgcggccgggcgcgtgccgtggtcctggtgggcctgccggtcgatgtagtgcgtttcgaattgccgggcgtgatcaccaggaaggtacgcatcgagaccgtattccgttaagccaaatcttcgacgccgtggatcgccgggcgcccccctgaagtcaccccgcatggcccagatgcggaacaattatgattgcggcgtgttcgtggtggacggcacgcgtgcgctggttagcatattggcgcaaggaccacgaccagcgcacgagccgctgcacctcgacaacctcgtcgccgatcggcaggcacttcaggaccgactgagggctcatcttggaccgatagaatttggggagcggcttgagcggctgtcctgcggccatggcgcccagcgcaatttcggcgggacgcaacagcccgcaccacatgaccctgttgcgggaggactcccaccgttgatcccgttttgagtatggcgcaaggaggcggtcggcccagatcggtgggccgccgcatgatgttagggagccttggccgcattctgacgacgatgcagctcttgccggcgcacttgttggtcagcgcgctcctgtcaagctgcgcgaggcggcgtagtcacgccgctgctggcattaaacgcttctgcgaaaacgaagacgttccttcatcaccgaacactcttctccacggcatcaacacctccggccaacaagtgttactccttgtgtccggtacgacacgtcgcctatgttcttgcagcatctccgcgtcgaagcctgacttatcggcgagcgtcggacgcggggggagaagaaatactatgttgctcacctacccgccaaggcagacctgcgcacgttagctgccacaatcaagtcctgacggagttgctaacaggcccatcagcagctcaaagaggaattcggacttgatcaacttcgaaccgcgatcctggcaatggcacggccctcatcgtcacgcattcatgattatagttgatttaccttccttcaacatcggcgtcttgcagcggaaaaaagaccactgagccgcggcatcccgatctcgcctccggaaagccatggcctattcttgtgcccgatccagacgtggaagacagcggctaaatcgacaacctgacgagtttggcgcgccctgcaaccgagtccgcaaagtgatttatcctagctgaatcgatgtagaggtctgaggtgtcttccaatactctcgctacggcttcagcggtggagtcgaccaagtttgtaattcggcggcgcaccaaaggtaagccaactccagcttcctttgcaaaagtctgccacccatcagcgtccatctcggcaagcgtgacccgtttcccgatcctcatggccattttcggtgaaaggtctggataggcgaccgtagaaagcagatcgtacagcggggccattttcggtccctgatcgtcgtagaggatcgagaaattcttgccgtgggcatcggcatttccgacaaccaggttgaagatcgcggcgtccagcagcttcaacacatctgtagcgggccgcgctgatactcgccgcaacagctcaaagcagtccttgaatgtcggcccgccctcgctggcgtatttcgtttcaggcggcacaccaagtgcttggcaaaagtcttcctggtggatgcggtgaaccacaccgtcggcatcgcgatagcgatcgtatcgctcgaccacaagaaaagggcgcccattcgcagacctcggttcgactggtgcaacgtcgaggccgatcgctgcagcgagtctcatcacgaatgcttcgttttcggttgtccctggaaagcgcgcgattggtggtttcagaatatgtgttgttgcttgtccggaaactggaagcgcgagctcgccgtcaatcaaaacaagcggcaccttggactgcgcgccggctagcgatagcctcaagccttcctggccggccaatagcggccgcgtcggaagtgcgtccagtatccgaacgattccggcctcatccagaggtgtcggctgctggtctggaagcggccctgcctctatgggctcctgatcttccggcaaaagctgaagtgcgccggcgacgtcgccgcccaagcgatcaaggagcgcaaagtcgttcgcaggtgaaacgcccaatgcctgcgctgtcacaagacgctggctttcctcgggcaacaggccgccgaaaaatggtcggcattcacgacgagaaaaaggttctgcgcgcttcgggagggaggcagacagcggaagcgtgttttcgtcgtcgagccaagcttcgctgtaggcaaagccgatatcaccgtgcctgtcctgggtgaattgcccgacaatgcgaccatcccaccagacgttgagaacccttaccgtcattttctacgttcaccaggagccagaatatcgatcgaacagccgagtgtttgcaaaacctgcaacacttttcctatctgagctgtcggtttgcccgcttcgagatcgacaatgaaccggaggccaacgccggcaacgcccgcaagctcatcctgccgcaagttttgctccttgcgcacgatgcggactagagcgccgatatcggctggagttttgatgcgcttcgccatttttttgttttcccgctcgggaaagtagcatcatatcggccgccctgtcgagtgaaatttcccggtcgggaaaatttatgcccgagaaggcgtatcgccaatgaaatttaccgctcgggattacgaaattgagtggcaattttggtggcaggctgagttttcgtcccgtcctcaaattctatgaagcgcagtataagcctgggcggcgtgcgggctcagattccgccgcgccgtttctgcctggactgcctcccttatctttaggccgctgaggggcggcgcctcacgtgcggcctcatcgacgacggtagcctttctcgcgcccgcaagtgcagctcaaaggcggcttgcgcctggccagcttgctgatcgtcggggagggcatgctgaacctgcatcgaagcgccagtttggttggcgaaaaattgtccatgctagtctcatctccgcagatcccggcggcacgctacgctggcaagctgccgagaagctgacgagcctcgccgcgcagtgtaaaaaagccgcgtgccaatcccatcgcggacacgaaaaaagtcctggacgcaagcgtgccgctgaatatgcgcatcaagcctgcggtccgcaacctgagcccgcgctgccgagctgcttgggaagacacgcactaatttcatgccggaggtctctgagcgtcgcgccgaggaggcgctgctcgtcgcgcacttcgttgcctgcgagggcaaccgcgtcatcgcctactgcgcactcgcttccggtgcggtaaagcagccgaagcggctggcggtttccggcgcaatatgcctgacccggttccgggtgccgtcctcggccgcctcgcagtcgaccctcctattagggtcgcggcatccgtagggcattggtgcacgacgcaggcctgcgcctgctccatgcttttgaaatcctcggcattcgcggtgtgctgttgcatgcgatttccagtgagcgcgagcgttctagaggcgatcggcttcctgccttcgccgtccgatcccacgatgctgacggccgggttgcatgatctcagcagtgcgctgaatccctgacgatctttaggccgccctcacaattcggatgtggttttgtaatcgtcattagaatgtggcgagcactgtagcggtctacccctttgccgaatcaacgctgtcgccgggcacgggcgaagcctgtagcaccgctgcggaagcgtaagcctcagtccccgcgttatactcggtaaaatgtggccgcgttgtcgtggaacagtgccgagcgttctgagaccgagaagcccacggtgatcttcttgaaggcattccaaatggcgtcgtaacttgagaacagcttatcgacggggaaattcgaggcgaacatcgccctgtcgaccccgaaggcggcaatcgcctcctcgacatatgggcggatgctctcgctggtccagttccagttccccataccgaggccagagatcttgcaggcgacgttgggcgcttgtgcgagtgtcttcatcgctttccgccagccctcaaaatgcgacggcccgtcaacctgcatgccggtatggttgaggatgatctgcacgtctgggaaatcacgggcgagttcaaggaattcctccatctgccagtagtagagctggaggtcgtaactcaggccgcgacgagccagctccttgaagccctgccgccattcgggcgtcctgctgacctcgggctcattcaggtaggtcttggcgccatcggtgtgaaagttcatcgactggcggataccgcggaagttcgcgtattgcatatgctcatcaagcaggtcgccgacatcgggcttgcggaagtccgcatagccgacaatgccgtgagggaagccatgcttgtccgcaacgccttggagccatttcgtttcgccggcggggttcgtggggtcaaatccgacatcgagatggaccgccttgacgaggttctggttcttcgcgtccgcgaggaaatcctcgatcaggtaggtcttgttgatagctgtataatcgccgaaggctgaaggcttaacaccgtcggaaagccaggggtagtagttggtctccaaatcccagaggtggaaatgggggtcgatgatggcgatgtcggacatggtatctcctcggggtcgcgggaaacggcaggcaccgccgttcccgcgagtctcctgtcagttgctcggggggaaaacgcgggcgatgaccgccttcgcttccgccgtatcgatcttgtcggcggtcacgagcggcatgacaagcgcaagatccttttcgaccggagcattggtcagagcgttgaatacctgcagcgtgccgtcgatgccctgtcccaccgcctcctggaagaagatcccctggatggcggtggctttcaacagtgcaatggtcgtcgggctgccgtctgcgaccgcgatgccgatctttccggtcaggccgcgggtttcaagcaccttcgccgctccggtcccggcctcatcatacataccgtagatcgccttgatgtccggatgggccgtcagcatgtcattggcctgcgtcaccgcctcattgacggtcagcccacgcgtctccagcatctggacaagttcgcagccgtcggctgcgaaggcctcctgagcgcccttgagatacttctgggcgttctcgcggtcctgcggaagggaaagcataccaaccttgttgccgccgcgctccttggcgagggcgcagacgaagctgccttgggctttgccagtttcgtagttgttggcggtgaccgaggacgtgtagtccgtctggccgggctgcgggccgatacccgcgaaagcgatcggtatgttctgggatttcagataggcgagcagaggcggggtgctggtcgagctcaccggaccgatgacgatcgcgtcgacgccctttgtcaccgcggtccgcgcattatccatctgcttggccggcgaattctcggaggtgaactcgacatagtccatacctagctcttgggccttctgcttcacgccgaagccgacccactgccaataggaaatgtcgagcgatggcgcgagataggcgaccgttttcctgtcctccgcatgcgagacgctcgacaacgctgccagcgctgcacccgctgccatggcgagccacccgttcagtttcttcctcatgccttcttcctcctcttgacgtccaggtctcccccgggacggattacacggcaccgcgccgcgatttgctgaagcgatcgatcaggaccgcgatcaggatggcgaggccggtgaccgatccctgccagaaactattgatgccgatgagattgacgccgttctggatgaccgtgatcatgagcgctccgagaaccgcgcccaccgccgttcccgtgccgccaagcaggcttgcgccgccgatcacaaccgcggcgatcgcctgcagcatgaggctcgaaccggccgtcgattccgcattgagaatgtaggaaatcgtcagcaatccggagaaggatgcgagaagtgacgaggcaacataagcgaagaactgcgtccgcttgacgggaattcccagaagacgtgccgctgccgcgctgctgcccacggcatagaaccagcgccccgcgaccatcttcttgagaaagatctcgatcacgacgagcaggacgatgcagaacaggatgtagttgggcacgccgggtatcaggctgccgctgttgagcagccagaaatccggatcgccgatcggcatcgagcgtccattggtgacgatgaaagcgagtgagccggccacggcaaaggtgatcagcgtgacgacgaaaggcgcgagaccggccaccgtgacgagaaagccgttgatcgaaccgaacacaagcccgaccccaagcccaatcagcgcggcgctgacgtcgagacctgaggccatagcctgtgctgtgaccatgccggtcagtgagaagaccgagccgacagaaaggtctatgccgccggtaatgacgacgagaagcacgccgagcgacatgatgatcagcggtgctccggcctgtgtaatattggcgaaattgccccagctcatcgcctgcggcacctgtgttccaaccgcgagaacgagaaggacaatggcccctgcaatcgccaattccgtacggtaggcggaaacgaggccttcccgagttcggattgcccctggcgtagccccggcctggtcaataatggtcttcgtcatgccgccattcctgtcaatgtcgcaagcttgtcttcgctgagttcgtcccgctcgatcacacccgatgagcgcccctctgtatcgaaagcgagcacctggtcgcagatctcaagcaattccgcgttttcggtcgaccaccagacgattgccgtccccgtagtcgccatgtcccggatcaactggtagatttcccgcttggtgccgatatcgacgccgcgggtgggttcttcgagcaccaggaggcgggaaggaacgttcagccagcgggcgagaagaagcttctgctgcgtgccgccgctcagcgtgttcggcaggtgccagagcgaaccggctttcactttgagcgcctgcatcaggtccagacactcgacctcttcccgcttggtggcaaacagggaaccgcgcgtcgcgcggcgcgatgcgagcacattgtcgatgatcggcagggaatggaggatgccgcggtgcgaccggtccccggttacgaagcctgctccgaggcgcgcggcctctcgcggcgaacggaaacggtcgggccatccggcgcgcgttaccgtccagcgcctttcgtgcgcggcgccaatgagcgcggcgatcagggtttcggggcccgcaggagcgccggcaacaccgagaatggtcccaggctggagcgttacggaaaaccctgtttccgcgatcgtcagcggttcatcggacagagacgccaccggtgccggccgagcggaatgggcaacggctgtggcttgcgcctgccccatatgctcgatgatggcgagatccgacagctctgccgtcggcacgttccccaccacggttcttccgtcccggataatcgagcaaacatgggcgatctggcggatttccttcatgcgatgcgagacaaagacgaccgagaggccatttccccgtgtcaattttctcagaaccccgaacagccgctccgtctcggccgcggtcagattggcggtcggctcgtccaggaggataagttcggcccccgacgacagcgctcgcgcaatctccaccatctgtccctcatggaggctgaggtcgccgacgagacggttcagcgcggtacccgcaaagtcccgatcaatcatcgaaagggcggcataggcctggctgccggccgtccttccatcgtaaacgcgcgagcccttgcggaaatgaggcagtgctatgctctcagcaaccgtcaggtggggaagaagcgcgagttcctggtggacgacggcaaccttgcggcgaccgtccgcttcggtgaggatgttgccggccatatcccggaagacgagttcgccaccatcctttgccgccgttcccgtgatgacgcggatgagcgtcgatttgccggcaccgttgccgccgaggagcgcgtgtatttcgccgcgcgctaccgaaaaatccacgcctttgagcacgactgtcgcaccatacgacttggtaagtgatcggaccgagacgatgtctttgctggcgtcggtcatagtcctgtcctcagtagagcgtgagcgccgggatgaagctcaccgcaagaaggagcgtcatcgccatggcaaagaagggccagagttcacgggtggtctcgccgagtggtgatttggcgatcgacgaggagatgaagagcgtcgtgccgatcgggggggtgtagagcccgattccaagattgatcaccatcatcagcccaagctggacccggtccagaccgatcgtgtcggcaaggggaacgaagatgggtccgagcagcaggatggcgggcggcatatcgagcggcatgccgacgatcagcatcaggatgttcatcattaggatgatgacgatcgggctcgagatgttggcggcgacccaatccgccatctgctgcggcgcctggtcgaaggtcaagacccaacccacggcggcactgcccatgatgaccagcatgaccacgccggtggccatgccggcctcgaccacgttgtcgcagaatcgcttccatgtcaggtcgcggtagtaaagaaggctgagtgcgagcgaatagacgaccgagagcaccgcgacttccgtgggcgtggccaggccaaaccgcaggaataggatgatcagcaccggcagcagcaccgcgggcaggctcttcagtgccagcgtggcgagctgccgcctgctggtctgcgagggctgcgaggcgtagccgcgcctcaccgaaacgaaccagcagacgaagacaaagctcgcggccatcaggatgcccggcaagatgcccgcgacgaagaggttggcgacactgacgccgcttaccagggagaagaggatcatgggaatcgacggcggtatcagaacgtcgatgaccgccgaggtcgcgttgttggccgcgcagagcgcgggcggaaagccgtgctttttctgccacgggataagaacggatccgagggcgctggcattcgccacggcggaaccggagacgccgccaaacacgacggaagaaacgacggtggtcgacaggggtccgccccgccagcgctgcatcgcatgcgatgccagctccagcagctgccggccgagctcaccgccaagcatcagcgtgccggccagcatgaagaacggcagcgcgagcatcggaaaggattgggtctggtcataaatctgctgcgccacaatcgaaagcggcagatagccgttgaacaggaccgcgacgccggcggcgataatcagggcgtaaccgaccggcactgccagcatcatcagtgcgcagaagacaatgatcatcacgatcgtcatagcgccacctcgccgctttcggtattcgtccggtggtcccaaccgaggcgcagcacgcgcagagcgacagcgagcgtgacgatcgcgaccagcacggatcctacggcaagggcgaaatacccgacgctgttgggcaattggaggaccgggctgtgttcgatcccggcgatctcgccaacaagataggcctggtagccgagcatcaggaaagctccggcgctgacgagattggcggcgacaaatgcagttgaacgtgcgccatcccggagtttgtcgtagatccactcgaccgccatatggccgccggaatgggccgccagcacgatgccgccgaggatgaaccagggaaagatcagcaccggtagctcctgagcgaatgaaaagcctccgccggccagcacgtagcgggcagcgacattcgcggtcatgaagaccatgagtgcgatgccgctgaatatgacgacctgccgcgcgaaccagacgatggcccgtgccgtcagctcaacgagatttgagaggcttttcatgggatgctcccgcgccgacaaggcctcagcctttggctgccgattcgatctgggcgacgaaattcccgaagggcttcttctgctctcgacaacagaagcagtcgccttggcgaagccttcgcggtccacctcggtgacctcgatcgcggaaatgcgcctgaaggctgccaacacttctgcgtccttgtcggcggaaagcttgcgctgcagttcgccggcttccttggccgccgccttcactgcctcgagatcgccgcctagacgggcttgtgcaatctgcgacatcaggaacggcgtcgattcccatttatggccggtgagactgatgtacttgtttacctcgtagagcttggagctatcgatattggcgagcgggttctcctgtccgtcgaccacgccctgctgcaaagccacgtagagctcgccgaaggcaatctgctccgtcgccgcaccgagagcctgaaaaatatccatggtcatcgggtcggcgggcgtgcggatcttcattccgctcacctcggcgggggctgcgaccttgcgcttcgaattggtgaggtggcgaatgccattatcccaccagtcgagcggcaccacgccgaccgcttcgaagcgcttgacgagttcggcgccaacgggcccaccgagaacctgcatcgccttcgccgtgttctcgaacaggaacggaagaccgagcgcggcaagctccggaacgagcgcggacgtcgctccctggctgttggctgtgacatcgagcgcgccggtgcgcaggctcgtcagcatcgcggcgtcgctgccgagtgtttccgcgccggccacattgatggtcacacgaccggctgtcttctcggctaccagttcggcaaacttcgcggccgcgacagttcgcggatttcccggtgcggcaccatggcctagggtcagtgtcgtgccggcccgtgcgggccgaaccatcgtgacgatcgcaggggccgcgagcacggccgatgacgcggccaggaagcggcgtctggttatctcgtacttcattgtctctcctccactttgaaactgttgcggccccgatgctcctccagcgcgggtgaccgttttcgtcactcgtcgagccactccttgatctgggccacgattttcgtggtcgatatgccgtacatgtcgtgcagggtcggcagggcgcccgcttctagaaaggcgtcgggcagtccgatctgccggaatgcggcgggacgcacagcggaccgcatcaaggtggcggcgaccgcttcgccgaggccaccgataacggtgtggttctcagccacgaccacaagccgtccctgcctggcgcactcagcgaggatcgttgcctcgtcaagcggcttgatcgtcggaacatgaagaacgccggcatcaatgccgttcttgcgaagttcctcggccgcttcgagcgcccgcatcgtcatcagaccggaggaaattatcagtgtgtccctgccatcccgcagcagcttggccttgcccagttcgaaccggtagccgtattcctcaagcacgagtggaacattgccgcgcagaagccgcatatagaccggaccctcgtgggcagcgatggccgggaccgcctgctcgatctcgctggcatcgcaaggatcgatgatggtgaggttcggcatgccgcggaacatggcaatgtcctcggtcgcctgatggctcgggccatagcctgtggtcagtcccggcagcgcgcagacgaccttgacgtcaagcatctcctcggcgatcgcgaggcagatgaagtcataggcgcggcgcgatgcgaagacggcataggtcgtcacccagggctgcagcccttcccgtgccatcccggcagccgacatcatcagcaactgctcggccatgcccatctggtagaagcgatcgggatgggccgcccggaagacatgcagatccgtgtatttggcgagatcggccgaaagaccgacgacacggtcgtccttttccgccaaggcggaaagcgcatgtccgaaaggcgccggacgtgtcggctggtcggcgccggcaatggaagcgatcatcgccgacgtggttaatcggggtctctccgcattgccgatcagatgggcggggcgttcgtatttcgagcgtctcatgccgtcactcccgcgtcgatgatccggatcgcctcggcccattcctgcggttcgacgcgcaggaagtggttgcgctcacgcgcctccaggaagggcacgcccttggccatcttcgtatcgcagatgatgattctgggctgcggatgccggtgctggcgcgcattgtcgaaagcgtcgacgagcgcatcgatgtcgttgccgtcgatgcgttggacgtaccagccgaaggcctcgaactttggaccgagaggctcgaagttgagcaccccgagcgacgggccgtccgcctgcatctgattgacgtcgacgatgccgatcaggttgtcgagcttgtaggaaccggccgacatggccgcttcccaggtagaaccctcgtcgagctcaccgtcggagaagaggttgtagacgaaggaccgcgaacctttgcgcttcagcgcgagcgacatgccgacggctatgccgaggccgtgacccagcgatcctccggtaatctccatgcccggcgtgtaggccgccatgccggacatcggcaggcggctgtcatcggcgccataggtttccagttcatcttcgggaatgatcttcgcctcgatcaaggccgcatagagtgcgatggcataatggccgatcgacaataggaaacggtcgcgaccttcccactccggatcgtccggccggtaggtcgtcgcatggaaataggcgaccgcgagaacgtctgcgatgccgagcgcctgtgcgatatagccctggccctgaacttcgcccatgcggagcgcatgccggcgaatgcggcgcgcacgctcgggcagactgatgttgtgaccgatctgagccatgccgtccttcctttcaggcttcctcgtggatcaatggatcagcatgccgccattgacgtcgatgacggcgcccgtgacgtaggcggagagatcggatgcgaggaagagatagatgttggccacgtcgcgcgcgtcgcccaaacgactgagcggaatgcccttgacgatgtctgcgcgcatctcggcggacagcttgtcgccggtgatgtcggtctgaatgagccccggtgtcacgcaattgacgcgaatgctgtcggggccgaactccctggccatggccttggcaaggccgagcacgccggccttggccgccgaataatgggggccgccgaagattccgccgccgcgctgcgctgaaaccgacgacatgcaggcgatcgatccaccgccattctgccgcatgtttggtatgaaaacctgactgagattgagcacgcccgtcatgttgacggcgacgatgcgctgccagtcggcgtcagagatatcgagggtcttcaccggctgggtgatgccggcattgttgatgaggatgttggcgacgccaaacgcgctcaagacctcatccgaggcggacgtgcaggaggcacgatcggcaacgtcgcaacgcagcccgatatgcgcaccgtgttcgaccggcggcaggtcgcccgctgcagcctttgcctcatcggcgttgatgtcaagaatggcgacccgcgcgccgtgcgatgcaaaaagctccgccgttgcccggccaatgccacgcttgctcgccgcgccagagatgacggcggtctttcccttcaaaagcatcttttctttcctcccgacaccgactatgcggcgcctggtgtctccttccaggcctctgcctgtcctcgtggaagagttgtggcgtagcgcgcaccgtccttcaaacgccaactttacatctgtgggtgaatctgattcactaatcccatgctgcagacgacgtcactctccgctatgcgcatttttgaagctgccgcgcgactcggttcgttccgggcagccgcggaggagttgaacctctcgccgagtgccgtcagtcatgcgattatgcggctggaacgggatctgggggtggcgttgttcgaacggacgacgcgcagcgtttcgctgactgtcgcggggcagacactactcaatcatgcgtccaatgccttcgaagaattgcggcgcggtgttgaacaaatttcatccaacaaggcgcaattgctgcgactccactgcgcgccgagcttcgcggcacaggtgctgtcgccccgtctgccgcagtttttgaaagagaatcccggcatagaggtccgggtggcggccagcaccaactacgcccgcttcgtcgatgggctcttcgatgccgatatcgtctacggcgagccactcaatcgtgaagacctgatcgtcatcccgctttctgaagaaatcgtcttgccgctttgcgcgccggatctggcgcaccaaatcaagtccccgcgcgacctgtttcaccaaccgctgatccgaagcgatctcaagcgcatccagtggatcgactggttcgaagccaatgaccttggaccaccaccatcaccatcgatgagttttgaccggagcttccttgccgtcgatgctgcggtcaacgggctcggaattgcgctcgagtccgatgtgttggccaggcgcgagctggaaagcggcaagttggtccgtcctcttcatcggatctgtcgcgacaaccgctatatcggccactatctcgcctatccaaaatccggcagccagcggcgactcgcccgcgcctttgccgattggctgacgcgcgaatgccagccggccagcactggctcagagtagacattccgccaggcttctcggccgcgacgtctcactcgtttccgagtgaagcggacgagaaatctttcaaggccggtcgctcaaccgtatcactgaaggggccgcgtacccgaggcgtgattgggactaataaccgtcattgccagataggaagcatgtgagcaggtcgatccggggaaactcgactgatcaaagaacgggtttcgctcattcccagattcgaaaccacgccggcggcaatggcagggaccagggtattaagggttgatttttggcgggctgcatggaggtacatcggtggggcgagaagaaaggcgaaacttcgcctccttcgtcggttctcgccactgggttcattttgctcagatttgcccgacatggcctaaggctttacgcactcacttattatccatgagtttttgaaacatgtagatgtattcgagggcgtagcggcgggcgtgttcctgcaggttggcggcggcggcgtgaccgccctcgatattttcataatagtagaagggcaggcccatgtcttcgaacagcgcggccatcttgcgcgcgtgcactgggccgacgcggtcatcctttgtcgaagtttcaaagaagggttccggatacgctacgcccgccttgacgttgtgataaggcgagatcgagcgcaggaaggcgccttcaaccggatcgtcgggactgccatattcggcttgccaggaggctcctgccgacatgcgggtgaaattgaccatgtcgagaagcggcacctggatcacgactgcgttccacaggtcggggcgctggatcatttgcacgcccatgagcaggccgccgttcgaaccccccatgatcccgagatgcggtgtcgaggtgaccttcttggcgatcaggtcctgcgcaacggcctggaagtcgtcatagacgcgctgacgatttgtcttcaaaccggcgtcgtgccatttcgggccgaattcgccgccgccgcggatattcgcgagcgcgtaggcaccacccttttccagccacagtttgccgagcaccgccgaatagctgggctgcattggaatttggaaaccgccataggcatagaggatggtcgggttcgtgccgtccagcttgacgtccttgcgcgctacgaggaagtatggaaccttcgttccatccttcgaggtcgcccagaactgctgtgcttgcaggcctccggcatcgaagcgtgctggggtcgaagtgatcttctcgacttggccggttgcagcatcggcgcaaaacagagttgagggttcgaggaacccttctgagaagacgaacaactgatcgctctcatcgtcgctagacgtcagggacagcgtcgaattttccggcagagccagcttgaaagacgaccagccgcccttgccgaaatcgaagctgcgcacctcgctggtgacattcgataggatcgacagcacgagacgatttttggtctgggtagtgcctgcgacagattgatgctcgtttggcatgaacagcacaagcggttcaacgcgcgctggatcggcgagcgccgccttgagatcgaaagcgataatcgcaccattgtggaagacggtgcctttggccgaggtccagtccgacttcaaccaatagattgcctggcccttgtagtagccgctaaagacggccgtggtcggtaggggcaggaccaccttgcgcgtatcggggtggccgtttgggtaaaaggctagttcggtattgaagaagtcgaggccgcgatacgaggtgtccataacatacttgccatcgatgtcgcgtagcacgccgcgctcagccgagacgtccttcttttggccgcggaaaatctcgaccgcctgatccaagctctggccgcgctttaccaccttggtgacgtaggcatagccggaagaggtcacttcacccggcgtccattcccgggtcacgtagatggtgttctcgtccacccaggtcacggactgcttgccttcgggtaggacgaagccttccttaacgaattcacccttggcaatgtcgaattcgcggaccacatccgcatccttgccgccatcggacaggcggatgaggcagagattgctcgtgggcggcaggcagtccccgccttcgaatacccaggtcttgccctcggccttggatagcgcatcgacgtcgagaattgtgcgccattgcgggttgccggacctgtaggactcccaggtcgtgcgccgccataggccctgcacgtgcgtgccgtcctgccagaagttgtcgatcatcccgtcgcgcgcgaagctgggcgaagcaatgcggtcggtcgcctgtaggatcgtcagagcgtcggcctggtactcgctgtaacgcggatctttcgacagcttatcgacggtcgaaaggttatgcgcctcgacccaggtcatcgccttgtcgccgtcgatctcgttcagataggcgcgaggatcggaggcgtccttggaagctttgttggggttggaatcaatcgccgtggcgacggtggtcatctggggctgggcgggagccgtcatggtgaccatagtcatcgccatcatcaagctgttcagaaatgtagtgagcatggtttgcctcttcgaaagcctcgataaacgtattggaagcgtttaaaatcaatcgcttcgcacccttctcagcaaatgctgtgccagtctgtgtgggcaagagctgtgccagcccggttttttcggggtcattgggaggccgttgtaggagaagtggcactgtgtgtcgcaaccgcgaaacggcgttggacgacgtcgggcgcggtcggatccggcacttcagggagttcgcgctatagggttgactcgggattgtcgacacccagccttgctttgtggaagaaccgcgcgtctgcgtatgaagagccgcgccgtcagcggcaatttggtcaacaagctcgggggatttttccgaaaacctggtaggccggtcaattcgtcatcccggactgtccacccaagggcgcactccaataagggtcaagttcagtgctgattgacacctccgccagaccgccgtcgctcatcaggccgtcggggacccctcaggagcttccggatatcggacctatcattggcgagaattggcgccacggctccgaaccagcctagaatgtcgtgatcgacgtactggaagatatcaatctactgccaaaccagttcggtccaaggcaagcttccaccttaccttgaccgtgcactagagagcgagcgcctcatgccggaagccgggcgcccgacatatatcaacatccgcggcgtgccttatagggccgagttgctggaagagaacggtcgctcacgggttcgtatttatcctgtgactggctgaggaatgcgcttgagctgcaatctcggttgtaagcggagcggcgcaccgcgggcaagccttttaccgccccagccactgtcataggcctgctcgtaccaagggcgctcatgggaactgccctgcgcaatgatatacgagcctttggttagatcgaaaacggcgaacggaagttcaacttgtacattcgatccaggagttcgctgctccccagtggaagagtgacctttcgccgtggggcagcaaccttatgcgttgacatacacgtatcttgcgcgaagcccgcgcccgataggatcacgcggttgcggacggtttcctgtatagcatgccgtcgcaccatacgtgttcaacgcggccccactcgcaggctgcggctgcacttgggaagaagccacgcccatggtaattggcacttgtgttgcaaagcaacggaatgcccgtgagcttttcatattcgacaagtacctcggcgaccttatgctgagagttcctggaaatggtttgcagccgcgcagatccgtcaagatgtacaactgcaggaactttgtcctgccacggcatcttcgtctggtgatcgaacaacatgtatggatcgggcgttcctggactaaatatatccggtgcacggtcctccagacatattggcgcaactggccggaagtgttcgcggaatttgatttcgttaagatgatctttcatttccggcgaggtcgcagccgccagaatgcttcttcctcccagtgcccgtggtccaagctcgctgcgcccggaaaggaaaaccacgggtttgttgctggcgaggatggcggccacttccgagatgctgcacgggctagcatgccacccagctggtactttgcctgcttgcaggctcgggccgctgtagactgaccagtctaatggcacgaacccttgctgggccactatttcacagcaggctgcaccaatcgcagagccgctgtcattaggaaagggcggtacccaaaccgaatcgaacaggcctgtctcgcgcagcgcactgttccatttgatattgagtccacagccgccagctatgcacagattgcgtgctcccggcaggggatggtgctgcaaggcgttcgccatttcgtcaacgaggagacgttcgaggaaaaaatgagacgatgcaagcacgtcttcgggcgcctctgcccccaattggagcgcgctggcagcgaaaaaatcgtgcacggccgcaagtgaggattccgagttgttgatgttcgcacggaaggcgcaggcaagcgcagtatcgccggcaaagtgttcttgatagagcttttggaacacagcaacgatgcgttcgtgaactgatcccagtgcgataaaggccatcagcttgccggcaacgccgaggtcccagcccccgcggctcgtctgcttataggggccgaagtagtggcccgcggcagcgtaggcctggcctgttaccgggaacaacgatttgacgaagctggctcgcttgccttccacatggtagagccgcggaaatatgcagccgtcccacaccaggcaaagcgcagggtctccggatttggcaaaggggctggtgcagtatgcagaggcgacatggctcgtaacatgcggatagcttctgtagctaaaaacccgatcaccaagtgtgaggccggagccgccgatccaatcgagaagtccctcggcgtggcgttcaacgtaaggcgcgcctctgaggataacaggagtctccccactgaggaccttgaactgcgactcggcctcaccgtcccagccgtcgatgacaaactgatcaacgtctcgtgcattgaccccgttttccgccagagccgccacaacagcatcgagattgttgatttcttgatagcgcgaattgttattccgcttctcctgctcagtacagaagacgagccttccatcttcgacaacggcgatagccccgtcatgggttaacttgatgccacagacgcgcatagtgtctctatccaaatcaggtagtcgatttctgaaaacgggaaagcaagcagtcttcattgaccgatgcgccgcggcaataaagccgctccacctcgatcaacgtttcgttcaacatcgcgatgacggtctcggcaccggccacatgcccccagcgccggcaattagcatcgattgcggatccaaaaaccatgtgcccacttggcgccagcatgctcaccaggttgtgaacggcggtgcgtatcgcggctacatcctcgagataataaagaacttcggccacgacgatcagatcgaatagctgctgagtcgagaactgtcgaacgtcagcgactatccagttgatgtgagacgattccttcatccgttgcctcgttcgagcaatcgctcgcggcaccacatcaatcacagtcagccgcttgcaataaggcgccagtttttccgtgaatgcgccggccgcgcacccgacttcgagtgcgttggtgataggaccttgggaaagcgacaaccgaagcatctgcgaatgtcgctcctgctcgaacgcattggcgtcgagccgccatgggtcctccgccgccagctcacggtgcaataaatgatagttgttgacctgcgtcaaattcgcctccgagacgccgtgcacggatctgcaaagactcttgcacatgggtgggcagagcgaggcgcgaatccggaggcgtggaatgcacgcgaattcccgaaaaagcggtcgccggcaacgatggctccgtcaatactgctacttgtggccccttgagttcgctcgaaagtcatacttttctgatgcagcatcaagcaaaattcgtaaaatcgatttttgtgatgccaaacatccaggttatggaagtttcgccagttccggtcactccaagggcgggcgtgttggggctgctcggcttgatcgcattcgtctggagtgaagagttggagtagtcgcccgatcgttgagaggctctcgatggatcgttcagcggcttttctcaacaaggctttgagctttgagagtgtgtattctcgatcgggtgaaatcgggccatacggcgggagctatccaagggaggcatccatgtcgaaatcacaattgggtggatgtgatggagacgtgttccaggcgcttgtggcagatgcctttgggattctcagacggcccgatcgatcctgcgcctgttcagggagcagctgttgttgctggacgggagggtggctgctagactgggaggttgcaccagcgcctatgaaggccgtcgctttccagtgaccataagggacgctgatccgcgagcgttctcctatacgggatcgaccgtagcggtgcgccatactgatgaaagcccagggtctcatcgttacaatgaaacgttccggatcaaggtcaagttggctgccgaaccagacttgccgccgcttcaggatgtcaggatacgaaatccgcgtactcttgtgtgctgctggcgatgcgcctgatgtcgccacccaagaatcgcctcactccttccttgaaggaagctcggccgatctcgataattgacgaccagacaaaacaatcgaggctcagttgtctgaggaacgccggttcctttgacccggccatttcaagctctcccagcggccgtgtgcgctctcatgcgccatgtctccagcatcatccaccgtacccgacttgatacgcattcatccatggcgtggatctttgccatccaaataaacagttatcgcaatcttctgaacggcgatagagaaagttgacttaaactgaaagagagaaggcgaaattctttcgcgatcgcttttagactagaggtgctctgatgccgggaactcggtaacttgagctttggaccgacccggatatgaatgacgagcggaactaccgatcaatttctcgaagtcctggaactacacgattggacttggcggaggatcgaactgttgcttctcccagacgccgcgaccgcatctgcgtgagactctcaagagcaggattaggaagtcggcctgacggacatatgcagaatggttctcgatactggaacaactcaaacgtggcgggatctgcgccagtttgcgccgtagccggtcttccgaggcggggtccggagtatcctcggcgcgtcgtcactgatactactcccgatggtcgggaggggatttcgccaatcaagctgggggagacgacgataatcctggatctacacgggcaagggctatcggtgtcagcgaccgccaaacagattggctacggattgcaagaatgtatagcgcggcgatcaggatgagacggcggcgacaatctggatgagactcttatgtcgcggtcggcatgaaggtatcatgttgattgtcgctggcaagggtctcatcgtgttctgattgtcgctccgcgacaatcagggaagcacttttggttgtcgcgaaggcggcgggtctgccgcggtggcgtttggcttccatggcggaacgtcgccgatagctttcgacgttcatttcgaagatcgttgcgtgatgaacaagtcggtccaccgcggcaagcgtcatggccgggtccggaaagacgcggttccattctccgaagggctgattggcggttatcatgatggaacgccgctcatatcttgcggagatgagttcgaacagcacgctggtttcggcctggtccttggtgacgtaggccagatcgtcgaggatgagcagatcgaacttgtcgagctttgcgatggcggattcgagctggagttcacgccgtgcgacctgaagcttctggacgaggtcggtcgtgcgcgtgaacagcacccgccaaccattctcgatcagcgcgaggccgatggcggcggcgagatggctctttccgccgcccggcggaccgaacaggaggatattggcacctttggcgagccaactgtcgccggcggcaatggccatgacctgggccttggagaccatgggcacggcgtcgaaagcgaagctctcgagcgtctttccgggcggcagatgcgcctcggcgaggtgacgttcgatcctgcgatgcgcccgttcagccagttcatgctcggcgatggccgaaaggaaacgagccgcaggccacccttcacgatcggcctgttcggcaaattgcggccacagcgttttgatcgtcggcagcctcaggtcattgagcatgatgccgaggcgggcttcgtcgatggtgttgtggacgtttttcatgcggcctctcccgcataagcagaccccatcagggcttcatagctattgagcgatgcgagctgcacatgcacggtcggcaactgatccgggtccggaccgaagatggctctcaaggccatcaggtcgggcagtttgcgggcgtcgagcgttctggcaagctcctcggccagttcacgctcgcaaccgcgatcatgagccagggccagcaattcgacggtgatcttgcaagcctgccggtcaggcagttgctcgatgagagcgtcgaaagccctgcgatattccggccgggggaagagcttgtcgcgatagaccaggttgagaagcgccatgggctttttgcgcagagagtggatgacgtggtgatagttgacgacctggtcatgcttgccgctcgcgtgggcgcgacctcgtggcaacgtcagcagatgcgtgccgccgatgaagacgtcgagacgatcgtcaaacaaacgcacacgcagccgatggccgatcaaacgggaggggacggtgtagaagactttgcgcaaggcgaagccgccggtgcgcgacacggtgacgactacctcctcgaagtcggtggtgcggcgctcgggaagcacctgcagatgcgggcgctcggcatcaatgcgcttgccatgcgcggcattgcggcggctgacgatctcgtcgatgaaggcgcggtaggagcgcagatcgtcgaagtctctggtgccgcgcatcaggagtgcatcgcggactgcgttcttgagatggccgtgggagctttcgattgagccgttctcgtgggcgacgcccttgttgttgcgcgtcggcgtcatccggtagtgagcgcacagctcctcatagcggtttgtcagatcgaccttggcatcggcatcgaggttgcggaaggcagccgacaggctgtcgctgcggtgatagagcggcgaaccgccgaccgaccacagggcgttctgcaggccctccgccaaggcgacgaagctttcgccgccaaggatgacatgggcgtgctcaaaacccgaccaaaccagccggaagtgatagagcagatggtcgagcggttggccggcgatcgtcacgctgaggctgcccatgtcggtaaaatccgacagccctagtcggccgggctcgtgcgtctggcggaagatcacctcctgtgcttcaccgtgaaccgcccgccatgaccggatgcgccgctcaagtgtgcggcgaatgccttcgggcagttccggatgacgccgcagcatctcgtcgtaaacggcgaccgcacgaatgccgggagcggccttgaggagcggaacgacctccgcatcaaagatatgctcaagcggatcgggtcgacgccgaccgcggggcggcttgttctgcgacggaaggcgctgctctttctccatgcggaacgccgtcgcccggctgatcgacgccttcgcggcggcgacctcaacagaatgcgtttgtcggtacttcatgaataatctcatctgatgatcggttacatggcgacccggcacaaaggtggttctccattccagaaaaccgccaccgtagcgggccgaccgcgatcatgagacgcctaaaaattgcgccgcggcgggggtgtaactccggtcgggctacgccctcccttcgtcacacccccaccgccgagtctcatcctgattgacgctgagtctcaccttgtttgtcgccgcgcaaagaatgcgcgcaactacgtcgagcgggggctagaggctccgaaatatggccaacgcaagcacacaatgtttggcgaccggctcgcgacctatcttcgcgaacgcgtgaaggcttgtcccgtccggaccgcgcggcggcttttccgcgagatctagggtctcgaccgtttctgcagctatacggcgctatccgggctgacaaggtgaccgggctcgaaaccggcgcccgcaactacatcaccaagccctttgcctcgccggagtacctggcccgcgtgcgtgccgcgttacgcgggccgccggaagcgtcactgcaacaggattttccatttcgatgtctggcgaatgggcgccgcttgcatcgaggaacggattgtaaactcaagctctctgcgagttcactcttctgatggcctttctcaaaaatcagtgtcctctcgcatgagcagcttctggggatgatgcgcgtcaattttcccttaattcgcgtcttcgccagctcgccagcgggctggtggatctgcatcgcctcctttcgtcatatggaggggaccatttcaaccttcgcggtgcttgcggtgcgctccccttcacaaccagtgatcagaatgctccaagcactccatggggcggtccggagccgaggtccacacgccgggacgataccgcaatgcggctgtgtatgctggcacgctatcaccagcaaaaaggcgcttgtagagacaatgtcccccagtccatgttgaggaggggagatattcgacgatggcacgttacgatgcccggctgaggggcattggaaaggcacatgcctgcagcgcgttcgcaggccacgatttcgagggtaggaacattatgaagacaccgtggaaatttcttgctcaattggcgtcgcggcgacgatcggcaagcgtgcaagagaattttattgcgcctgacactgatcccgaagtgatcgaaagcgaaacggaaaacaagtcgccacttccgttcgacaagccaacgcaagcttctggcactcctgatcacgattccgcggttgatcgcgggtcgatgttatcggaccagctggaaagcgaccccaatcccctgcaggaaatgaacctcacagctgacattcaagagcctggaacccctgcccgaagtgaaaccaaacaatcggatgcggctgggaagaggctggggccgcaaagccagacaagcgcaaattcccaaaagaagccggagatcagatgtcgagaacgctccaagaacgcgcgcgccgagggggttgcgcagagcgctgtcgccacaaatgaagctgagaccgtacaaacctcgtcgtccggggatcctttcttcaacgaagtggcaatcctcgacgaggaaatcaaagagctgcgacgtctgctggctcaaaaactttatctgcagaacgctcagctcaaaaagatgcttgagcgtttcgacgcctcgtgagttcgcgtcaactgacgccggaccgagaaaatgctgcaggacgttattcgccgcgagttccgaggcctgctcgaaagcggggaaccagtggtgtgcccagccgacggtgaaggtggagcagtgtcccgtcacggccttcgacgatctcgaggagattattttcgcgcttgatcaaaagagaggttcggggcgccaatcgttcaggatcaacagctgaaaatggtgcgcggcaggcgcgcatatcgccctccacgagcaagcgtcagttgggcaaacggccttgcgccgcactggtaaaggacggcgcaaccatcgcatcaggccttgtgcccgagcgcaagccaaccagctctctccgacgccggacggtcctcggatggccagatcgtcgtgcgcatcgatccagtcgccgccaatcaagcctcatgaacaacgcgatcccggctgtgttcgcttcggcagtggcctgatggcgtagcccggcgaacctgaggcgtgcggcgagcttccggggcgcgaaatccagtcccgttcgagattaggcgcccaagcatctttcgttgtccttactggcgatagcgggtccgcagatgtttgtgtgatagatcggcttatgcgcgccactccagctgacacagcgcttcagtcgagatgattggcgacgatcggaacggaccagaccgtggaattcgtgccctgattcccaaggcacgagcgcaggcgtgtgtcgaagtcgactgggcgcctactgtgccactggatttgtcgagttcccgacattcgggaggcgagacatagcgccaccgaagtgatcgcgttgctttggaacgattttcaagcttggcacgacacatgcatagccatccacatacacgctgcgccgccgcgctggagattccgaagcaatggtgaagaacttccttggatcatcggttacatcaggctcggctggagcggaacatggaaagactttgcaaattccgactttacgatgggtgcgccagtcgaagacttcgatcatggcacttgtaatttgtctaggcaggatagtgaaaacagcactcgttaccggcggctccggatattttggggaactgttaagcaagcaattgcttagacaaggaacctacgttcgcgtgttcgacctgaatccgcccggcttcagtcatcctaatcttgaatttctcaagggcacaattctcgaccgaaacgcggtcagacaagcactttccgggatagacaaggtgttccacaacgttgcgcaggtaccgctagccaaggaaaaagacctattctggtccgttaactgcggaggcactcagatcatcgttgacgagtcggtcgcgacggggatcgaaaagttcgtctacacgtcctcgagcgctgttttcggtgcgccgaaatcgaaccccgtaacagaagaaacagaaccgaacccggcggaagattatggtcgcgcgaaactcgcaggagaaattatctgtaaggaagcaatgcagcgtgatggcttggatgtggcgattgtgcgccctcgcacagttctcggatatggccgccaaggcgtcgtccagattctctttgactgggttgaacgggggctcgatattccagtgttgggtgggggtaataacaaatatcagttcgtgcactcggatgatttagcatcggcatgcatagcagcctcgaatgtaaaggggtttgccacatacaatattggtgctgccgagttcggtacgatgcgtgaacttttgcaagtggtaatcaagcatgccgaaaccggaagtcgaatcaaatcgatcccgatgggaccgactgcccttgcagcgaatctggcaagcgcgctcggcctctctcccttagggccataccattcgctgatgtatgggagagcaatgtatttcgatatctccaaagcgcaaaaggaacttgggtatgcaccgagatactctaattctcagatgatgatcgagacctataattggtaccaggctaatagggcttctctcggaaaaggcggagggtcacgtcataaggcgcccgtcaaacagcagctcctggcattgcttccctatgcactgcggctgatcccaggatgaacgcggttccgataatcttggtttttgctgcgggcctgaattcctgtattggcaatatattgctgaaatggggccgggcctcactgcctcccagcgccggacttgccgatacgtttctcactcccggctttgtaggcggggtggtattttatggcattaacgttctactgtttgcaaaggctctggactccttggaggtatcagtcgcttatccgattctggcaggctccggattcgcgatgcttatcatcgcgtcgcattatttttttggagaaccattccaccttcacaaatggatcggtgttgccctcgtcctggtgggcattatttttctggcgcgaggaggctaagttggcattcgatcgagtgatcgtggcaacattgacacctttatggccattgctcgacgcggaagaaaggccagcggtggtgtcagaagtcgcacgcagtgtgacccgttccatcgcacttgccccatttcacattcgctttgcggtcgaaagcgtttcgatcgtcataggtctctgcactgtcttgatttcagcgggtgcaggcggtcccttggcgcgcacgctccgaacagacagattttatcggctcctgcaaagaatgcccggtcccgccggttctgtcatacgcctttatcgctcgatgacgctgcttgcattttatgatgaagcgccggtagccgaaaagctgttggctgcacggcctgctcaaacctcataggcttgaatatgaagggcgggttttcgttgaacagcgaactgcaactggaagccgatgcggtgataatcggttccggcgcgggcggtgcaagcgttgctgatgtacttacagctgccggtttatatgtgatcatgcttgaagaaggtgggcatgttccctcatcatcggcttctcctttcgcgagtgaagcattcgcggcagcctggcgcggcggaggattaaccgcggcgatcggccgcccccctattgcttatgcggagggccgctgcgttgggggagggacagaaatcaacagcgcgattgcccagcgcgccgatagcgacctccttgatcaatggcgcaagctttacaagatcgagaattttaccccggacgaactgtcgcaatattatggtcgcgcggagacaacggtgaatgcgagcctgacccccggcccactcgggcgtcccaccgacattctgcggctgggtggggaagcgcttggctggaaagtttcggagctgaaacgggggcagcgtgactgcaagggcgccaatcggtgttctttcatttgtccgaatggtgccaagcagtcgatggcggtgacccttctcccaaagtcgatggatcgcggcatgcggctgcttgcgcgaacgcgcgtagacaagatccgtatcgagaaaggacgtgccgcagtggtcgtcgctcagttgcaggacgccggcggacagggcgtgcacgtgcgcgtaaaagcgggacttgtgtttgtctgcgcgggagcaattcatacgccagcgcttttgcgtcgttctggcctgcgtaaacgcattggcgataccctgcgcattcatccgacgatcagagcgacggcactttttgatgaacccgttgatgcgcaccagtcgcgccttccgctgacagccgttaccgaattcatgcccgagcagcgcataggcgggtcggtgttcacgccggctgtctttggcctttcacttgcggaagactggaccaatcgcggcgatctgatgcaggcttggcgtttatgcggctcttattacggcatgatacgaccgcgcggagtgggttcagtgagacctcttcccggtattaatgaaccgcttgtcagtttcaaactcgcgcctgaggactggatctctttgggccaggttctcaccctcctcggacaggcgatgtttgcggccggtgcccggaaggtaatcccaagtatatcgggccacgagggctggacaaaccctgatgaggtcgatgaattccggaacaagcctctgcctgaaaaagcgaccaacctgatgaccatacatctgttttccacctgcccacccggcgagcatcgggacgcttgtgcagtcgacagttacggacgtgtgcggggcgtcgaaaacctctttgtcgccgatggcagcgtcattcctgaggcgcccggcgtcaatccccagatgacgatcatggctctggcgttccggatagcggaagcggcactcagtcattcctctcgagaacgcgcccaatcggccgcaagggagtaagtgttatacattaaggtccagtagtgaggaccgggaattgcagcccaggggaactatcgataaatgcgccacttgcccttcttctcggaaacaagcttgtagactgaattgttgtccagcaccggtttgccccacaaaccatctcttgaagtgactacaagagttctacaacgatatttttccttcataattctaagatggtcttctgttgccaggccggcgaaagcgcgtacgaagaaattatagatctctgatgcttttttaggcgtcagttgagcagcataggcgcgcaaaaaatcaagcgtggttccgcaatgtcgtctctgagacaaaattgcccaggagatatttgccggtgtataggtcacacttgctagatcaagcgggttgttggccaccgcttcattcggaggcgttacctcgcggacagctttccacatctcaggggatgctttgaaagcagtgccttcttctgaatcaggtccttcgacctggaatttgaaggtgttcgaatagacagacttggcgccaaccaaaattgagggggcgagtaaaataatagctgttatggttgtgaggcgcccaactagcgtgcctttaccgatagttgtggagaaaagcccagaagtcagcgcagtcatgacaagcatagatggaatgagtacacgccatcctaaatcattgtacataattacgctatggagtatctgtgtacaaaatagaggcgccagcaccgagacagttaaagcgcagtcaatgtgtgcgtatcgcttactgtcgtcagagggtctggcaaaactccagatgaggaatgataaatatattattccgaactcaagaaagaccagaacaagccagaatcctggaatgtccaaaaaccaataatcgccggcaaaaatgggaaaaacccaaaactccacgaccttcctagtgtgtaatatagcggactgttcgcgaataagcacggctgcacagagtagggttatgacgactgtgaccgaaagtgaaatgagaacctccagaagccgtttgacctttagcacatgtgagaccgacagcgcccccacaaggggtaatatcaaaagcagcgataagctgcccgcccacatcgagctcccataagcagaagccaagattgcgcccataaatactgccagagccatattgcgcccggcgttggaatataaaattcgcaggtatgccatgatggcaatcagggccagcgtcccggaaaagacgtgctggggtacccagggggcctggataatccacgtttggaggccatgttcgggtgccatccatttctcgagccactttccgaagacaaatcgcacggctggcttaagcgaaccgacgaataagagcgggagtgaccaccaagcggcatatgcacttctgcttcgcgccacagccagccaagttacgacaaacgtggagaaaagcgcggtcatgccggtaagagcgatgtcggcctcccagccggttgcgcctgttatcacggatgaacaggcggctatgaagtgccagacgtagtagtaaattagggtgttgggagatccggcttcggaatggaatggattggcgggaggcaatccgttttgagcgatttcatttacgatcgcgatctttgcatggtcccagatcgggtgaccgacgccgacgctacctccataatgctgcggaatgatctcgaaagctggcaaaaggcagaggagaaacgcaacagtgaaccagcaaaagccgggactcgcaggcgatcgcaggagcgggtctatggtgcctttcgagagccagaatgcgacagcggacaaaccaaggacgatcagcatcaggttgatcgctgtaatgggtaaaaaatgaaaaatggaaacggctacggcgccgaatatcccaagtccgatgaccggcgacagaagcaggcgcatcgtggtgttgctgtcaaaatacttcgaaacaggccaacctatggcatatcctatagcacttgaaacaagtgcgctggagacaattgaagaagtttgcaccagcactgacggcctcacagctcctcggcaagcttgactagaatgactgaccgtttttgacgcaccaatcgaccgaacgttgcatgccctcgcgcaacgcaattttcggggcgtatccgagcacttttctggctttggtgatatcgcaggcaattgtcttgttcatttccgacagcacatggatcttctggtgatagatcccggcatattggagggtagcatcaagtatcgttgcggcgccgcctacgatgtccggcagacggaaagggttgggctttaccgtcatgccgaaatcttcgtgcaggaccattccaacgacttcaatgatttcgttcatggtgtagggcgtctcgtctgcaagccagaaaatatctcccgcagcccgctcgtgaactgcggccagaagaatgccctgagccaggttgtcagtgtaacccatggatcggcggttccgccctgatccaataatgggaaacttgccttctttgaccatcttgaaaaaaagcgtttgccttgaaggctgattgggaccgtaaaaccagggcgcgcgcacgatgacaatctccatagtgctgccagcagccacttccgcacgcagtgcccgttccatcagcatcttggagcggccgtatcccgcatggggatcataggggctttcctccgtgaatctgtggtccgagtgaggattgaagccgaccggcgaattcgacgacatgacgacagcgcgccgcacacctgccttttgcgctgcagtaacgaggttgatcgtgccctgtgtgttgattgcttcaaactgggcaacatttttgggatgaatgatacctgccatgtgaatgagaacggcgccttcggcgccggcgacgaacgcgcggacggactgcatctcccgaaggtcacctgtcgcgatttccatgccctgtttgcgcaactcagatatgtcttctcccttaggcacgagggcccttacccggaagcttccgtttgcgagaagtcctgcatccggcaggcccgtcgtcaacgcggccgccacccgcccgcccaaccagccggcagctccagttaggagtacgagcggcgcattcaaagttataggggttatctcttgcatattggcatttgcttaatttcacatggccatcacgaacgccgacgcgatgagggcgccgataaaccagctggtcttgtcgttgagcgcgaagacaatagggtcgtcgtgcaattccatacgatgactgaggagccagatcctttgcagccaaatggaaacgccgagcggcgcaacataaagccatgctggattatgatataggtgcgtcactctgggctcgagtgcgaggaaaagcagcatgatgacgatcgaggccgaagcggacgcaaggccatggcccaaggttagcggccagtcgccaggcaagtatccgcgcccttcgatggtgtccttgcgatttgagcacgcgcgcattgcttccacatgacgctttgccagagccagcgaaatgaagaacattactgaaaacgaaaaaagccaaggggagaatgccaggccgttcagcacctgacccatgacaatccttaaggtgaataacgccccaataactgtcacatcgagtaacgcaacacgcttcaggcggaatgaataggccagtgtcagcgcgagatagacagaagcaaccagcgcgaattgatggtccaaaaggagggccgtcccaatgcctgtagcaagcataaccagacacgccagaaagccgttcatgacactgattcggcctgcagcgattgcccggaagcgtttggtcgcatgcgcccggtccgcctccagatcagccagatcgttgataatataggttgccgaaacaatcaggccgaaagcgagaaaaccgaacgtcgttttcagtacagcatggaagtcgtccgcaatgcggccgagaaacagaggcacgaagatcagcacatttttcgaccactggtgtatcctgagttcagaaagccaatccttcaccggatgacttttttcaggactgagcgtcctaacctcgacgccagcctcacggagtttgctttcgaactttactccgtcgccaaccagaacggctccggaagccgcctcccagatcggcaggtcggcggcactgtcgcctgcatagatgaatccctcgggaaagctctcctgaagccattgcagtttgcgccggctcttgaggttcagtgagccactactccccttggcaccgtcgaaaccgccgagatgagaaatgatatcatctgctatgctctgatcagctgccgtaacgagataggtttcacgcccggcagatctcgcgcggcgtatcaggtcaagcatctgttcacggtagggaagcgcctgcggctcaaccgaacggactttcgccagagcttccttcagggccgggcgccccttaaaccagtttggaatcgtgcgaagcaactgctgcggggaatggaagaaggcatcaaacaggttctcgtgaagactgtctgattttatcagtgtgccatccaggtcacaaatcaaaggcaacttacgatcaaagcagtccagatcaagcaccttcatttcatttcgccgctgtttcatcagtagcatcctccagccggacgccccgaaacaggtccaaagtacggcgggcgcattttcgggaggtggtgagcctggcacgcgcgttctggtatatgagctgacgaggacatctgctttttgcctctctcaaacgaccgctaagctatccatccccaccggggtcggtatctccagacgcatgcgacagaggagcatcaaatgttgtgccagcttgcacaaacttatgggaagagactttctgtatattgttcaatgacgtgcatgcgtggcgcctgatctcagctggcgagcgctgtgtcgcggacacgacagaatggacagcaggtgtctcttgtttgacgtttacaggaaccggcgccatagagtgatcagtgagcgggacgagggagcttggataaccgcggcattccgctgtccgccagcagtcgctgcacaagtcggtacccaggcggccagcttctacaacgacgccgaacgcaaggcgggtagggcgcgcggcttgtcatctgagcgggagaaccgaggatgctcgtcactcggctgaaagaggagctcgcggccattcagaaggcacggcaaagtactgaattggctgacactccgcgacggaacggcgcaagagtcgcggccgcaactgcatccaacctccgaatgtccaattcgcattccggccagctgcgatcaccattatagggtggcgaactcgtcgcgaaatgcgtctgagtgtggatcgatcttcggaactcattgcggcgaccccagccggatgggaatgccaatccccaagatagtcgaggtcgcccgcggtgttcctgaatgcttcgtctatctgctcgacctgccatgagtggtccggaatgaaagtatggcgaccatgcagcgctttcgggccagcacctacaatatcaacgacaacccgatcttcgccatctctccaaccgaggagaacaccgccggtctcgagcggaaagaatatgttggcctgttcgattattacttgagctgcgtcgcgccccaaccaaattgtcatccctgtgacgctccgcagctgcagctcgaatgtggtgcgatcgtctcggctttccaccgcgggagaatgcggcggccattttcggtcagatcaagaatggaaagctgccagtcacccgaatcgtacacgtccggggcgagcagtccgatcgtgctgcgtacaacttccatcgacacttcctgcaggtcaaaggcgcctccggtgaacgttggcgcgttgcagccggtcggaactatcgtgcccgagctgtcaatagttgggagcgggagcgtcttgccggaccaatgctgctgcaagcagacataacaacccggggctcccggtttgaatctcgccacaacgcctccggccgcgccttcggttgcgtggccgagtacgtaccgctttcctatgctacggcacatgtaggccaaggcgccctgacactcggtcgaggccgaagtgtctaccacaatgtcggcgtcctcgatcaatgctcgaagccaacgcatgggattcccctcgagtttgcggacgtcgtccacattcgagattgctgagcccactttagcgtgtccacgcccgacatttgtccaagggtagttgtgatagaggaaatcgtgcagcgcggttgtctttggcaggccccacaccgaacgacccagcgcccatctgaccgtgttgccaggctcgacgagatcgaaatcgatgatcgtcagctgaccgacgcctgagcgcgcaagctcgactgcagcgaaactgccgatggcgccgcaccctacgagaacaacctttttgcttttcaaagcactcgcgacaggcagtcgcgagagcatatcgctcgacagacggtatccgcgcaccaaggaaacctgtcgccggcggctgccaggcacgcgccgactgacgagaaagaaccaaccgttgcccttgttatcagggccgtaggaaagctcctcctgaaaaaccacggcggtaatcgatagatcgtcgtcggcaattgatccgagcttcttcaggtgagcggggaagagggccgattgtcgctctatcgccttctcggccgccgccaaaatctcctccggggcctcggggaatggcggctccaggcgtatccagcgcccgatgacgtttttccatgggccggcccgtttcgggagatcgaagggcttcgccatccaggtgccgctcaatggctccactttgctcagaatggcttgaaacggtggagaccttcctcgctccaggcggtcctggagcaggaaaactgcggttccgaggggggcatttggaacggtctgctgcccatcaaaaaagaccgccgaatactcctcggcaacatgcatatgatatggcgttacagggtcgggagcttgttcttcgaggctggctgcctcactccactgctcgttccgccgcagtgtcatgacttgcaggacctgcgataaccgctcggctatgaagtccgcgaccatttgatgggggtaccactgggcagagtcctgcgtcagcaggcacaaatccctcgtaaagggattctgatgccgctcgagttgcagttcaggcgcggatatcgagggtcggcagaacggatgcagcggcgagtagccgacattaagtcggatggacccggcactgtccatcggccaaaggacctcgaggatcaaggtgccgtcctgttggattaacggccggtgagaggcgccgtgcccctcataggccgccaactcccgggcatacaagccaggataggcctgccaccaattgtcctgatccgagccgcgcttaagaacgttcacctccgtcagccgaccggccggtgggacggggggtgagagggcactggcgggccatcggggcgacccggagtatggctgggcggccccttcgggacgtcggggtgttcaggatgaccttcccggcccggcttattcgtattcgacatgagtatctccttacaatacaggcctccgttcttgacggagtccaattccggattaaaattctggatgagtccagatatggattatataagaatggactcattcgttgttcaagtacacacttggacttaggagcagatttttatgacagaaccagttcgagggtcatctccaagcagcgattctgctcgagtccctgcagaactcgaagcgttcttccgcattgccgaccggtggcgtctgtctgccgacgatcagatcaagctgttgggatctccaggtcggtcgacgttcttcaagtggaagaaggcgggcggcacgttgcccgccgacacggttgagcgcctgtcgcacattctcagcatttggaaggcactgcgaattctctttaccatagaggagcgcgccgacgattggattcgccgacccaacgatttcttcgatggagcaagtgcactcgacaccatgctgcaggggagggttgtcgatatctacagagtgcgccagtacctcgatgctcagcgtggcgggtgacaaatggatgaggtcgccatcaaggacgagttttatcggctaattccgtcacggttcccgccagtcgcggtgtacgagggattggtcagcgaggacaagatcgaggcacttgtcgaaatagagaacaagacgaatccgcgtctccagtcggagggccggctgctatccgctcataccgatccgagggcgccgaggctgcagaactggaacctggctcccttcaagtacctgaacccggagggaatccgctttttcgacggtagtcgcccggcactggaattggcagacgatcgtcagaccgcgctcgctatgtctgtcgagcgtcgtcaggccttcttgtcgcgaaccaaggaagcgccaatcggcctcgatatgcgattgctcaagacaccggtgagcgggcggttcatcgattttcgaaagtatccgatcgatctatcgtgcgaggaacgctggagattgggaggttcggtgcccgaaggcgcggacggcgtgatttatcatccgccggagcggccctcagccatttgcattgcggtactccgaggcgacgttcttggccgaacgattcagacggtccattaccgctacgtttggaatggtacccgaatatccctcctttatgcctttgatgatgcaggcaacgaaattcgcccagaggtattgggtggcgcggatgatgcattcgccgtgtgagcattaaatctagcaaaacacacctacattccgcttaaaatcgatttcgccttctgcttattcacagtgatattctcagcaggcaactctacccttctcgtcgctttgtgacctcctctcgaaaccgggaacggagtactctcatctcggccttctctaaacgcctgctgatcttctcagccgtctgggccaggagcctgccgtcgaattcggggggaactcccctgttgtccttccagaagattttaattgcctgaaggtcggcctcttggagatctgcgacgaaagagcacgcggcagcaatgataagtccattatcatcatcggcagtttctgcggcgggtaccgccgctttggcgggcgatgccgctatagcggtcattgcaggctggtgaacggaccgcagcgacagaaacttttcgacggtgagcttgtcccattcagaggtggtgtcggcttcctgtctgagggtcggcgactgcgatcctcgcgccggatgaatgcccagcaaatgaacccgaaccccatagttctgagcaatctgcacgccgactcggacatcttcatcgccagacagcagcaccacctcagagatagccctttgccgtgccaactctatcaagtcagtcacgataagcgaatccacgcccttttgctgcccctgcccattaatgaacccgaggcgcaacttgatgtcatccatgtcggcgatggcagtctgatcagcgctcatcgctgcacctggtcttattccatcgtactagtaaatgcgcatcagtgacccagtaggggctttcgtggaacagaacgccttcagttcctcaatgactgacctcgccgagagtgacaacttcgccctagccactttgttaccggtgagtgcagtgctcccctgcgggaacagatagcccgcgtcgacgaaaatagcagagcgccccaagatcccccaaccctaaaagtagcaagggctcccgcgggagccctttgtatgccggcgcaaccataatatctaatcggtcacgccggagtaatttatgtatgcgccacgcatgcgcacaagtcaatacgaaacgataaacgctgcaggaaatggacgctaatgagacgcaacgcacgccaatcagacctaatcgcgctcaattagatattctgcatatacgcagctgcaacaagttactacggatataatgccgcgggcgctgcaacgcaagaggccgaagcagcctgcatcgcgcaaaatcaatggctatcgacggacaggcgccgcaccgaccagtccgcttaatttccggcgccggccgaaggcatccccgtcagactgcggaaaatgtcgacccagaatgcgaaatcgtctgctcgcccgtcggtccaggcctcaagaccgcaatgcgccacggcagtcgctgcctcgtcgccgaacaggtcaatcgcggcttccatcatgctttccgggtccgaaggttctggccagatcgccttcatcatagtcatacacctaatcgctgcttctcgggcgtgaggatactacgcgcatttgagcgttgcgcaaacgatcgtttatacacgcgttgcacaggccgcagaaaacgcaatgaaatcagctgcctagagccgcgtatccgggcaggattgcataagcatgctccattacgcaacggggtatgatgggcgagaagaccggatatgcaagggtttccaccctcgaacagaacctcgatatggaacagcgcgctctcaaagcggcggcaatggtcacgtccgctgcgcccctggtcgcccctcgacgggatcaggtgaacagcattatccgatttgcgcgcagatgccctatcaactcgcgatcgatgtcgcttgaggccgccgacggccacagagaccttaacgagcgaaccgttgtcgcgatactcctcgagcgtgaagttattgaccacctgcttgcggatcgagatcgagccaccttcgggtgccgcgcggcggcaagacgatctggatacgctcgccggtcggaagcgcggcgctgaggatcggtttcgagcggctgatgaactggttcgtcgcggccgcaacacgctcgccgacgttctggatttcatcacccatcagggcgacgattagatgatgctccatgtaatcggcgccaaaccgttccacatatacatcgcccggtttgttgacggcgatttccaccaccctcggatcgtcgataaattccctgatcggttcaagtgcggattccgacgtgaagccggccgcattccgatcaatatccggccaccgttccgatttgaagccggccacgattccaatcaattaccggccggttttcggctctaacgataccccctgggtcagcaactttggccatcaagcctccgggtacacgaggagatattgatgccggcgaagagaaggctgaccatgagacaattacgacaaatgctccggcttggcggaagcggaaaagcagccgcgagattgcggtgatgcttggtgttgcgcgcagcaccgtgcaggataacctgaagcgggcggcgttggcgggcctgacctggccactgcctggcgaactgaccgacgaggcgctcgagcatcggctgttcgcccgcgccggggtcaagcagggccaacggcgacgccaagagcctgattgggccgagctctccatcgaactgaagaagccgggcgtgacgcttcttatgctctgggaggaatatcgcagcgtccatcccgacggatactgctacagccgcttctgcgaactgttccgcggcttcgagcagcgcttgtcgccgacgatgcgccaggagcacgccgctggcgacaaggccttcgtggactattccggcaagggggtgccaatcgtcgatcgcaagaccggcgaggttcgcgaggcggaactgttcgtcggcgtgctcggcgcgtcgagctatacgttcgccgaggcgaccttgacccagacgctcccggattggatcggctcgcacgtgcgcatgttcgccttcttcggtggcgtgccccggctgatcgtgccggacaacctgaagtccggcgtcaaccgggccaacttccacgatcccgagatcaaccgcagctacggcatgatggcgtcccactacggcgtcggcgtcctaccggcccggccgcgccgcccgcaggccaaggagcagacatcacgatgcaccttgttggaattgttgagcgtcaattaacctaggtttgcggctaccatagcgaccgcctacgccttttgcgagtctaacgttagccggtggctcatacaggtagcggtggttggtagcgtagcgatggcgctttagaacaccctcgcgtccgagttggtgtacggttgtggcacttacgccaaatcgacgagccacttcctcgccagttagcatgccactctcgcgcaaccgttcgaaccgggtcttcagcccataggctcggcgaacgagcatgactttcttcaacgtaaaagcctcaccgcgccagttacgatgcccgagtgcgttgagacgactggcaatctgctggtcgttgtcggtctccagaagtttgttgatcagtgccacaaccgcttccggggtcttgcggatcacggccatgggccggggacgagctactgccaggctttgcgtgcgacctccgcaatgttgatctgctcgtcgaccagcagtgtcacgtcttcgatgaggaggccaagcatgcgtttacgctcgaccgcgctggtgcgctcgttgttccagatgcgcggaaaatctgcggccagcgctcggatccgttcctgcatagcgccgtccagcaatgactggtctgtctcgttctgacggtcatgttcgcgctgaagcgtatcgaggtcgcgtagcttgccattccaatccgcttcgagtgcgtcggcaaccaagcggttgtcgggatcgaccttcagatagcggcggcgtgcgagttcagcctcataccgggcgcgctgtaactgcttgtcgcgcagcgaggcagcttgttcgacacgttgtgagatctcctcctgcaccgcaagcgcgacctctatcgccgtcggtgccatttgcttcgagcagcaacgcgctgaccgcttcatcgatcgctggtcctcttgcccattggcaagccttgcccgcgtggcgcacgacggcctcgttgcagatgtaatagggacgaagcttgccctcgaactgttcataatggacccgcatgcgggcgccgcagcgaccgcacaaaactcttccttgcaataagccgttgccctgacgaggcatacgaccccgcaggcccggagaaaaaccgactgcattttgttcgagacttgtttgattgcgttcgaactcgtcccacgagatgtagccttcatgggcctgagggatgagcacctgccagtcggacctcggcatcttctgctgtacggacttaagcttggcattgtagatcgtgcgtgtgcgtccgtatgcgaaagcaccagcgtatcgtggattgtgcaaaatctggatcacgcgagaatggtcgatctggctccacaggacgtcgcccttgccgatgccgcgacggatacgacggggaaacaggatcttctcgctgcgcaggcggcgcacgaccgcacaggctgagcccacctcccggaaggtatcgaacagcatgcgcaccgtgtcctggatctggcgatccggatcgagcaccacgcgcatatcaggcgtgtagaccagtccgatcggcaacggtaactcgagctcgccacgacgcgccttgttgagaatgccgccttgcagtcgagacttcaggatgtggagttcggcctcactcatcgtgcccttcaggccgagcagcatacgatcgttgaacgacgcggcgtcgtaaacgccatcttcgtccatgatgagcgtgcgcgacatggcggccagttccagaaggcgatgccagtcagcattgttgcgagccaggcgagatacctccagccccagcacgatccctgcgtgccccatcgcgacctccgtcaccaagcgctgaaatccatcgcggtcctgcgactgtgcgccggaaaggccgaggtcgttgtcgatgacgtggacgcgctcaatcggccaccccagagccaccgcgcggtcccgtaatgcatattgtcgcttcgtgctctcggtgttctcgaacacctgacgaagggaggattggcggacgtagagaaatgcatcgcgccgcaggtgatcggcgctaatcttcatggcattatcagtagacatggcttcctgtctctgctgccagcaccatattggcgagcatgtgcacgagctggcggtcgtgcgcgaccattgaagttgtcttgaaccgaggcgctgactgctgtcgcgctattgcggattgatgtggtgcgatcagcactgccaggccgcgccacagtccgtgaaagacgatggcgcccatgcgcctcgcgcaagccgtgccgcaaataacatcggcgcggagcgcttcgtaaacatccttgccgttctctgacatggcgattgcgtgggtcggctcttcatcgtttttttttccgcgccaccgcgcgttcgatgctgcgaggatggacgctgatgcccagtctcgaatgcaccaggtccgccagagaacgggcctgcagttggccgttcgcgtcgagatgctcctcgacgagacgcatgacctcgccagtaagcttgtgggctgacttcggcccacgggtgcgcggcaagaggccggacatgccatcgcgctcgaacgcggcctccgcttgatagtaggtctgccgagaaagcccaaaaagcgcggccgcatccgctttgttggtgccgtcttcgcgggcgtgccgaagcatctcatacttcacttgcacgagatcgagcggatcaaagaaacctgcttcccggaaccagggggcgcggacgctctcgggcttggggttcagagcgcccatctggcgcaggcgatcgggcttgctttctttggtcatgggagcctccttgtgtaagataaattatgccgcacttggctcgcacgtcaattaaattatatcgctaatatcgccgatacgcatgcatcacagggcttcactccttgctttgatgatcaaagacatcgtacgcccggcataattagccttacatgtgcggcgtagtttacttgacgcttcgtcactcttcctgacggcgcttaatgcgatcgatcaacgacgccagcgccgacagatcgtctgggcgggagaaggaccgacctgcagcaacctgactgaacaagtcggcctcattaacatcggtccacgaggccggcagcgaacgcaaccgtccttgagcgtcgtaaaacatgacgcggtcttcgccccagttctgtttgcgtgtcgacagcacgaagcgctgtccgcgccaaggatggaacgggtgtgtgacctcgaactctatgcgggcttgagtgtcagtacgaactgcagtcctggacttgaaagaaggcgaagctcgagaacgccgtgcgctttgcccagagctgcattctcggacgcctccgcaagcagaccttcttctcgctcgccgaggctaatgccgcgatcgccgaggcgctcgcgcgcatcaacgatcatgtcatgcgccggctcggcgtcagccgccggcacctcttcgagacggtcgaacgcccggcactcgcaagcctgcccgccgaagactacgagttcgccgaatggcgcttggcgcgggtctcgacggattaccatgtcgagtgcaagagcttcttctattccgtcccgcatgccctcatccgccagcaaaaaggcgctgaaaagtgatgcgataagcgccctttacgaaggatgatcgatcagccgtttcaatgtcgtcaagatcgaagagacgctgacgatcgaaaagtttttcccagctacgccgcacacgagcgctcctatgttcggatccgttgctccccgttgctattccgcgcaacccatttcgcgcgcccactcgataagtgttcggctctcgcggatgaatgcgcatctcagacgctcgccttctactccgcctgccttgtccttggtgattgaacttcctcaaagggcctgaccgttacccaatattactcaatcgtagggctcatcggcgttgaatgcgtcatgggggtgccgtaagccatcatacatggagcgagaggagaaggcggtcgagggggccgcagatgcttcagcaaggaggagatatgaaacgtcgtacattcaccgctgggctggcggctttgccgttcctcggctccagcctcacccgcgcattcgcgcaagatgctgccgcctcgctcccgaaaacctattcggggcagaagatccgagcgctggcctcgaccggtgctgccttcgaagcgatggctacggtcagccgagacttcaccgaggcgaccggcatcgccgtcgaatacgtcaacctgtcctataacgagcagtaccagaagctgatcctcgatctaaccagcggtgcggcgtctttcgacgtcttcaacttcgcctatcagtggaaattcgagatcgagccgtattgcgccgatcttgcgaatattccgaaggaaattcagggtgcgccagatctcgcgcttgacgactatccgcaacgagcactcgaaatctacggccgtgccaacaacaagctcatcggtctgccgacactcggcgatgtgacgctgttcgtctggaacaaggaggcctacaaggccgcggggttggatcctgacgccgcaccgaagacctgggacgaagtcgtcgagcgcggcgccaagctcgtcagcaacggccaattcggctacgccatgccggcgggcaagggcattcaaacgaccgtgacctggatcatggtgttcaagtcgatgggcggcgaatatttcgatgcgtccggcgccccgacctttgccagcgaagccggcgtcaagacgatgaaattcctggtcgagaagctggcggcggtcagccctcccggcaatcttgcctgggatttcccggagatgttcaacagcctgtcgaccggtcagtcggggcagtcgatgatgtggcccggagctttcggcgatctgctcaacccgaagaggtcccaggtccacgacaaaatcgggtggtcgccgatgccgcaagcttcactgttgggtggctggtcgatgggcgtcaacgatgcctctcggtcaaaggatgccgccaagctttacgtggcatggctcacatctcccgacatcgttcgccgcatgggtcttattggcggggctccggcacgcatctcggcgctaaaggatccggagttgatcaagcaggctccgaaccgaccggctgtgcttgccggtctgcagggcgacgtcgccgaatatccgccgatcaaggaagcggagcaggtccacatcatgatctatgatgaggtgaatgcggcggtggcgaagatcaagacgccggaacaggcggccagcgatcttcagggcaaggttgagtctttcatgcggcgccgcggctatctcaaaacctgaggtcgcgctccgtggggggcaggcgttcctccccgtctgccccccctttacaacggcaaatctgcaagtagtttacctgatgacaatctctcaaacagttccacggggcgcagtggcggttcgccggcgtcgccgcatccgcatcagcactgtggtgtggttcacgatgcctgctgcggcaatcatgttgctggtgctcggcgtcccgctggtctactcgttctactacagcctcactggctggtctctcgtcgttcccggcagcgatcaggacttcatcggccttctcaattataccgatgtcttgaggagcagcgagttctgggcggcgatccgcgtgacgctgatctatgccgtggtcgcggtctcgctggaatgcgcgctcggcatcctcttcgccgtgcttttgaacctagaattcttcggccgcggcctctttcgctcgctgatgctgatcccgatggtgatcaccccggcggtcgtcggcatcttctggaagctgctctatgagcaggattccggcgtcttcaactatctgcttggaaccctcggcttcgagccggtaccgtggctgagcctcaccgtggcgctcgcctccgtcatcatcgtggacgtgtggcagtcgacgccgttcttcacgctgatcattctggcggggctgcagtccctcgaccgcgacacggtgagcgccgcgcaggcggacggcgccaatgcgctccaggtcttccgctacctgacgctgccgcatctcgtcccctatatcatgattgccgcggcatttcgcattatcggcgtcatggccgacttcgacaagatcttcctgttgacgctcggtgggccgggcaatgtcacgacgacgctcagcgtctacgcctacaacaccggtttcaaggtcttcgatatcggcagaaccacggcgatctcgtggatctatgtcgtcttcgttctcgcgatcagcgcgcccctgatctggcgcctgttccgcggcgcaagcgtcaaccgccactaggggaggtgaggcatggctatttcatccaacaccagccgcaccacccgcaagctgctctggaccctcttctggtgcgtgctcgccttcgtctatctgtttccatacacctggatggtgctgaccggctttcgtcatggcgtcgacacgatctcgatgccgccacgcttcatcttcgagccgacgctcgccggcttcaagcacctgttcgaggtgaccgggtttcagaaatacatcatcaacagtgcggtggtgacgattgtcagcgtcgtgctggtgatcgcagtctccgcgccggcggcttacgcgcttgcgcatgtcaccaagcggggcggtactctcctggtggcgatcctggtcgcccgcatcattcccggcattgcgatcggcgtgccggtctacctgctggcgacgcgcctccaccagctcgatacctatcaggcgctgatcatcatcaatgtggccgtcaacattcccttcgcgatctggctgatgcgcagcttcttcatggaggtgcatccgacgctccgcgaggcggcgatttcggacggttgcagcgaatggcaggtcttcacaaagatcatgatgccgctggtgcttggcgggatgctggcgaccgccgtgttcgtgttcatcgcggtgtggaacgaatttctatttgctctcatcctgaccacctccgttagcccgacggcacctttggcgatgctcggctttagaacccagtacggcgtgcagtgggacgctgtcggtgctgcggcgttcctggtgtcgacgccggtcatcgccttcgccttcataatgcagcgctacctggtgcaaggcctgaccatgggctccgtcaagtgacaggcatggttggtacaattcttcgcagaaaggccgagcagaatatgactgatgtaactatccgcaatgtcaccaagcgctatggcgctctgaccgtcatccctcagctttcgttcaggatcgaggacggggagtttgtcgtgctggtcggaccgtctggctgcggcaagtccacgcttctgcgcatgctggcgggactggaggagatctccggcggcgacctcctgatgggagccgacgtaatcaatgatcgccccgccaaggagcgggacatggcgatcgtcttccagaactatgcgctatacccgcacatgacagtcgcggaaaacatgggctttgcgctgaaactgcgcaaacgcccgcgggccgagatcgatgaacgcgtcgacaaggcggcggcgatcctcgggctcggcaagttgctggatcgttatccgcgcgcgctttccggtggccagcgacagcgcgtcgccatgggccgtgcgatcgtgcgcgacccgcaggtcttcctgttcgacgagccgctgtccaatctcgatgccaagctaagggtgcagatgcgggccgagatcaaggcgcttcaccaaaggctgaagataactaccgtctacgtgacgcacgaccaaatagaagccatgaccatggctgacaagatcgtagtcatgaacgagggacgggtggagcagatgggcacgccgctcgaactttacgaccgcccggccaatatcttcgtcgctggctttatcggatcgccgtcgatgaacttcctgccggcgacggtcgctgcgacgaacggccctcttctgaagacgccggaaggcgtggcgctgccaatcgatggtggtccgacgcttaccggacgctcggaggtgacctatggcattcgtccggagcacctgcagctcggcgagaccggtattcctgcagaggtcgtggtcgtcgagccgacgggttccgaaacacagctctatgtcacggtcggagggcgcgaagtcgtcgctgtcctgagggaccgggtcgacgtgcggccgggcgaaaaaatctggctaacaccaaggaagggctgcgcccacctcttcgacccgaacaccggcgcacggatcgcgggctgattgcccgctcacgtcccgccgaccgcgtctggaagtcgaaacagcccgagggaggtctcatgcgcaagctccgagaactcggcgagcatggcgtcgttggcatgccgtgccgcgatcagtccgctgacgccgatcgcgacggcttcctgcgccatgccgaaactgtcgacgacggcgagcgtgctgaagcccttggcgatcgcggtccgcaagagattcatctcggcggtcacgccgtagccgaagtcctcgaggctggcgcgcatttctccgtcgatcgctgtcacgctcggaaagttgaccactctgtggcagccggcggtctcgagggctttgaggatgtcgacgtggcggcggaaaggatcaagggcgaacacgcccgcaaaaacctggctctcgctcaaaacgcccttccggagctcggacaagagacgttcgttggcgtcatggatcgggagcagcaccaggctgtcataggcgctgccacccaatccctcgcaggacgggcaacaaagcgtcacggattgtagatgatcgccgggaagggcggcgagatccgtcacgatcggaatggagggaagtgttgagggagagtgcattgtgtacccgagaaacgtttacccaattctacccaaatcggcggcctcagccaattgatttgctgtggcgcgccactaccgtttctttgaggcgaggaaagcccgctgaggaagggccgggaggagaaagatgaatacagtttatgtggtcgggacctgcgataccaagggcggcgaactgcgctatctccgcgatcttatccggcaagcagggtgtgacgctgtcctggtcgacgtttccgtctcggagttccacagccaagctgcggatgtcgacgttcagccgtcggaggtcgcgcgcttccatccgaacccgccgaagcccgaggatctcaaggaccgcggcaaggctgtcgccgccatggcgcaagccctggtggaatttatccggtcacgaccggacgtcgacggcatcattggtgccggcggtaccggcggtacggcgctgatcgctcctgccctgcgggcgctgccgatcggcaccccgaaggtgctcgtttccaccgtcgcctcaggcaatgtcgccccctatgtcgggccgaccgatatcagcatgatgtactcggtcacggacgtctccgggcttaaccgcatctctcgggtggtcctcgccaacgccgcccattccgtagccggcatggtcctcaacaaggttagcgccgccaaggacgagaggccggccatcggcctgacgatgttcggtgtcacgaccccttgcgtccaggcggtcacccgtgcgttggaggcagacttcgactgcttggtgtttcatgccaccggaaccggcggccagtccttcgagaagctcgccgattccgccctgcttgtcggcgggattgatgtctccacgacggaggtctgcgactatctggtcggcggcgtcttcccctgtacggccgatcgcttcggtgccttcgcccggaccagactgccctatgtcggctcctgcggtgcgctcgacatggtcaatttcggggcgatggacacagtgcccagccgatttcgctcgcgccgtctgcatgtccacaatccccaggtcacgctgatgcgcacgacccctgaggagtgcaacaggattggcgaatggatcgcggaacggctgaacctctgtgaggggacggtccgcttcctgatcccggagctcggtgtctcggcgatcgatgcgcccggtcagcccttccacgatcctgaagcagatagcgcgctcttcgcagcgctcgagcgcacccttcgccggacgaccaagcggcaactcatccgcgttccccttcacatcaatgatccgcaatttgcggaactccttgtcaccaacttcaaagaggcccttcgtgagcactgatactcttgtcaagcgtcccactcgttctgagttgatcgaccgtttccatagtaagatccgcgccggcgagccgatcatcggcggcggcgccggcacgggcctttcggccaagagcgaggaagccggcgatatcgatctgatcgtgatctacaattccggccgctatcggatggccggccgcggctcgctcgccgggcttctcgcctacggcaacgccaaccagatcgtcgtcgacatggcgagcgaggttctgccggtcgtcaagcacacgccggtgcttgccggtgtcaacggcacggatccgttcgtcgtcatgccgaccttcctgcgcgaactgaaggagattggctttgccggcgtgcagaacttcccgacggttggtcttatcgacgggcttttccgtcagaacctcgaagagaccggcatgagctatgcccaagaggtcgcgatgatcgctgaggcgcacaacctcgatctcctgacgacgccttacgtgttcggcccggatgatgccgtggcgatggcgaaggccggtgccgatattctcgtctgccatatggggctgacgaccggtggagcgattggcgcgcaatcaggcaaaacgatggaggactgcgtcgccctcatcaaccagtgcatcaaggcggcgcgggaaattcgcgacgacatcatcatcctttgccatggcggcccgattgccaatcctgaggacgcgcgcttcattctcggcgcctgccccggttgccacggtttctatggcgccagcagcatggagcggctgccgaccgaagaggcgatcaagtcgcagacgctcgccttcaaagcgatccgtcgcaagccggcctgaccgtgagaagggaaagcaagcagatgaccatctttcgaagtggagaccagccgccgggttggtgcgaactcaccgacttcgagttcgttgacttgaccgatcaacccttgccgattccgcttgccgccgaaaagcaacgtctgctcgtcacgagcggatcgtgctgcgtgaggagcgccgagggagcgcaggttctgagtgaaggccagttcctcgacatggatggggccaatggtcccttcaccgcggatgccggagaaggggccgcacaagtgctcgttttttatggcagatggggcaacgaactcggcggatgcggggtgttcaagctcggccccgacaccccggttccggtcaggggggatccggttaattatcccaagtcgacgaacttcgattcgcattatcacgactgcgacgaatactgggtaattatcgagggggcggggacggtcgtcgtcggctcacgcagcttcgaggttgaggtcggcgattgcgtcgccatcggcatggggcaccatcatgatctttccgaagtgtggtccgacgtgaagggcgcatatttcgagacgacgctcgaaggcaggaagcgctttggtcatctttgggagcacacgcatgggcctgccgatgtccgtcccgagcgggtttgatccgtcgcgtgcgccaagtcctgcctacctggaggtgaacatcaatgacgtataaggtcctgcatatcggcgccggcggtttcggagagcgttggtgcgacacgttcctgccgcagaacgtggcggacgggacgatcgaggtggtcggcctcgtggacatcgatgccaaagcgctcgatatcggccgcaagcatctcggcttgaaggccgaacagtgtttcaccgcggccgcacaagccttccagatggtggatgccgacttttgcaccatcgtcattccgccagctctgcacgaggggatcgtcgacctcgcccttgcgcgcggcatgcacatcctgtccgagaagccgatcgccgacaccatggaggcctccgtccgtatcgctgagaaagtgaggaagtccggcttaaacatgggcgtgacgatgagccaccggttcgatcaggacaagtcgacgctgagggcgctcgtcggtgccgacgccatcggccgtgtcaatacggtatcgtgtcggtttgccggagacttccgcctctatgattcctgggggcgctttcgccacgaaatgatgcatccgatgcttatcgagggcgctgtccatcacttggatatcatggccgatctcgccggcgcaccctgcacgtcgatctatgcccgcacgtggaagccggaatgggcagattacaaaggcgacacagatgccatagtcttgatggactttgcgaacggcgctcatggggtctatgaagggtcttcggcacaagccacgggtcttaacgattgggctttcgaatatgttcgggtggagggggaaagcggcacggctatcctcgaccatcgtgagatcgaggtatttcaccgttacccgatgcggcttcgacaagcgagccggcaaggaaaaggtcagcaagtgtcgctgctacccggcaggaagtggcagaatgccctgttgatcgagcaattttgtcaatggctcgacagcggcccgccgatggcaaccaacgtttgggaaaatctgcagtctgttgcgctcgtattctcagcgatcgaaagcgtccggctgggtcaaccggtgaaagtgcaggaattcctccagtcctaccgagtgggggcttcgatcgagtaacgataagatgtaggttagcctcacaatggctgatccgatcgttcatcctggggttcatcgtcccgaattctccgctcccctccacgcgagagcggagattatcgcgacactcagggccgcgcttggcaagccaaacacgactctcgttggtgctgcgatcggcacgggaatggccgcccaggcagcctcgcggggcggcgcagactttatccttgccctgaatgcgggacgtttgcgtagcatgggcgccccttctatcttttccctgctcgcattgcgcaagagcaacgactttgtcctggatttcgctcaatcagagattctgcctttcgttaaagttccagtctttttcggcgccagtgctttcgatccccggtgttcgatagaagctgaactggaaagaattgcggatgctggttttggcgcaattgtaaacttccccacctccatttttctcgatggacggtttcgagccgatatcgagggagcagggctggggttccagcgtgagcttgaaatgcttcgggccgctcagaaaagaaatatggcgactctcgcctatgttcgaactgtggccgaggctcagcaggccgcgaccgccggcgtggacatcataaatctcaatctcggctggaacgtcggagggactgtcggaagccgcacagagctcagcctgaggcaagcggctgagtatgcgaagatcattttccgtcagatacgggccatctcggaggatactctttgtgtcctcgagggcggccccatcgtcagccccgaccaaatgtacgaggtatccgcactgtccaaggcagacggatacatcggcggctccaccatcgatcgggtgcctctcgaagcctcgatggagcagattacatcggctttcaaatccgtcggcaccttgcaaaagcgaattgatgaactggagcgccagctcgagcatgtgcagcgcgaatactcgatcgttggtcggtcaccttcgatccagcaaatcaagcaacgtatcgaaaagcttgccgcttctagtctcccggtcatgattaccggacaagccggaaccggcaaaaaacttctggcacggggtattcatgaagctgccagacgttccggcagcaagctcatcagctcagaagacgcaagtggggaatcgctttttggcttcgccccgagcgagggcggcaggaaggtgcttgggctactccaataccatcccaaagcaaccctgctgatcgagagcgtcgaatgcctgtgcgtcgacgctcaggaacgtctgatagaagtcatcgagacaggcgcttatcggcgcctgggcgacaacgagagagggcggttcgaaggccgcctgatcctggcatcgacgcggccgcttcctgagttgggctcgagcgggcagctgatacctgctcttgagtcgcgtctcgcgccgggtcacgtctttcttccccctctatgcgatcgcctcgaagatcttccactcctagctgaacacttcctacaagcgctccgaaaggatcgtcgtagccggaagctgtcggtggaccactcggcctatcgagttctgatgacctatggctggccagaaaatattcgcgagctcagatccgtgctcgaaacggccgccatccgctgcgaaggcgactggatcaagtccgagcatctgccgccgctcggtgacgcgaacgcggacgcgccgcatccgcatccgggggaagagcgggaatggatcctggatgcgcttcagcgccatcggtttcgccgcggtgaagccgcccgatatctcgggatatctcgaaagaccctatacaacaaaatgcgagtgtacggtctcccgttgcagccaagagaaagatcctaggcgagggcgccaaataactccaggtagcttgttcagcgactgcagcgccgccgccgaacgaccgcagccggagcgcccagaccggttattggggtcgcgaggtagtggggcgcctaagctcaacacaagctcggacgtgcaggccttcactaaagcgaaaagaagcctctcgccgactttcacagaggggggagcgacagcactgttcgggggtaattgaagcggcggcggggaagtagcgaggtggcaacaccgtcagtcgctgtccggctttagcctcgcaagaagtgctaagacctcggcttgaatgtctaggcaaagggcttcgtatttgagtaccccttcctccaggtacggagtctctctccggtgacgttcaatagcctcggccgcgacggcgtaggcttcaaacaggccatccaattcaattcgcggctcctgatgtgccgcagcagatctctgtgacgaggcagggctagcgccagccgagctctgccgttgcgaaccagtgacatttcactcgatccccagcacggccctcggcagctcatccttgatcaggtacgagcaaattatgcggaggatcgcatttttatggtaaggtaacgctaaagcaggctaggtgttccgagtttgatggtgtggaacggccctccgagccgtggctcaacagcgatctcaaggtgtcagcgaaagcatctgcttttgactgtccaaaggaagtgctgcgcctctcaactcgccatctgactttaaatggatggcaggggtggccggtaacgggcatctggtatagacatggcgtcatgtcatgccagacgcagcttctcagcgcctcggaggccgccttaggagaggacttcctctccgctctctcgacggatctggacaattgggctctgttcctcgatatcgatggtactttgcttgacctggccgaaacgccggacgccgtagccgttccgccttcgctgcctgcaagtctcgatcacttgtcgaaaaaactcggcggcgctttggcactcgtgaccggtcgcggccttgattatgccgaccagcttttttcgccggccaattttcccattgcgggccttcatggtgccgagcgccgcgacccggatggccgtgtgcacaaagccgcagagacggcggattttgagcgactgaaggccgagctggtcgccgctactgccagctgggcgggcgttctgatcgaggacaagggggcggcggtcgctgcccattatcggcttgcgccggatagacaactcgaacttgaacagctgatggagtgggcgttgtatcgagccggaccagactgggcaatccagcacggcaagatggtcgtcgaaatccgtccagccagagccaacaagggcgatgcagttgcggcatttctcggccagccgccctttgccggcagacgcgcgatcgcgatcggcgacgatgtgaccgacgaagcgatgtttcgcacggtcaaccggctcggcggcctttcgatccgcatcggaccgcctgtgcctgcgagcgaagcgctcggctccatcccttctgccgaggccctgcgcggcatcatcgccgcattggccctcctgaatatttgagcacctgacatattttcttgcatgaaaggaattcggcatgagccgtctcgtcattgtttccaatcgcgtacctgttccggacaagggtggcattgcgccggccggtgggctggcggtcgcgctgaaagtcgccctcgaagagcagggcggcggcatatggatgggctggtcgggaaagtcgagtggcgaggacgagccggcgccgcttgcgcaactgcagcagggcaatattacctatgcactgacggatctgaccgataccgacgtagaggaatactaccacggcttcgccaaccgcgttctctggccgatttgccactaccgccttgatctcgccgaatacggtcgcaaggaaatggccgggtatttccgcgtcaaccgcttcttcgcccatcgcctggcgccgcttgtcaaacccgatgacgtcatttgggtgcacgactaccccttgattcctctcgccgcggaactgcgtcagatgggcctggagaaccgcatcggcttcttcctccacattccctggccgcctgcagacgtactcttcacgatgcccgttcacgaggagatcatgcgcggcctgtcgcactacgacgtcgtcggctttcagaccgatcatgaccttgagaacttcgccagctgcctcaggcgggaaggcatcggcgacgcacttggcggaggccgcttgagtgcctatggccgcatattcaaaggcggcgtctatgcaatcggcatcgagactgcggccttcgccgaattcgccaaaaaggcatcgaccaacagcacggtcaaaaaggcgcgtgaaagcatcgagcgccgcagcctcatcatcggtgtcgatcgcctcgattattccaagggactgacgcagcgcatcgaagcgtttgagcgcttcatcctggccaatccggcacagcgggggcgtgtcacctatctgcaaatcacgccaaagtcgcgctccgaagtgccggaatatgaagccatgcaacgcactgttgccgaacaggccggcagggtgaacggcgcgctcggcgccgtcgattgggtgcctatgcgctacatcaaccgctcggtgggccgccgcgttcttgcagggctttaccggcttggcaaagtcggcctcgtgacgccgcttcgagacggcaagaacctcgtcgcaaaggaatatgttgccgcgcaggatccggacgatccgggcgtgcttgttctttcgcgcttcgcgggcgctgcccgcgagctacagggagcacttcttgtcaatccctacgacatagagggcaccgccaacgccatggcgcgctcgctcagcatgccgctggaagagcggcaggaacgctggacgacgatgatggatcaattgctggaacacgacgtttcgcgctggtgccgggattttctcaatgatctgacggcatcatcagatcgatgtggttagggctccttcaatcaaagatcatcatcgtgccattaatgaagtccggcgaccggctgcggcgttatcgccatagccgcctggccgcatttggatcgtcggcacgggattgagattccaccggacccggtgtccaaacccgaaatcggctctcgctgcctccgaaccgcacccgaatacacggaattaccgtgcgcacctcgcacgcgatgcgactgttgtttcgagggtatcaaccgaatttcagactgaccgtcttgcgagcgccaggatctagggtcaggacctattaatttcgtttgggatgtgattcagagtctccattgaaggaggtcctgatgggtgatttgtttctgctaagcgagcgccaaatggctcgcatctctccgcattttccgctttctcatggggttgcgcgtgtcgatgatcagcgcgtcgtcagtggtatcgtctatgtgatccgcaatggtctgcagtggaaggatgcaccttcgcagtatgggccacataagacgctctacaaccgcttcattcgctggagcccggctcggtgtgtttgacaggattttcgccgctttcgccggcgaaggcccccaacctgagcgcatcatgatcgacgcaacacatctgaaggcccaccgcactgcggcaagccttctaaaaaaggggatgttccccgtcgtatcgggcgcaccaagggcggactgaactcgaagctccatgccgtctgcgacgaggacggccggccgatcatcatgttgctctctgaaggccagatgagcgaccacaagggcgcccggatcgtgctcaacgcgttgcctaaagccgattgcctcatcgccgataagggctacgacagcacctggttccgagaagagctcctcgcaaggggcatcgagccctgcatcccgtcctctaaaagccggaagaaaccgtacgtctacgacaaagacctctatcgtcgcagacacaaggtcgagaaccttttcgccaagctcaaggattggaggcgcatcgcaacacgctatgaccgatgtgcccacaccttcttctctgcaatctgcatcgcagcttctgtcatcttctggctgtgattaacgagtcctgaccctagctcaggtgccgtccgtttctttcccagacccaaagcgcgcgcaagctcggaacgcttttgagcatagcttgaagcaaccatggggtaatcagccgggagaccccatttctctcgatattgctgcggcgtgaggccgtacttagccatcaggtgtcgcttcagcgatttgaattttttaccgtcctccaggcatatgatgaagtctgcggtcactgacttcttgatcgggacggcgggccgctgttcttcgacggcagcctcctcagccttgtctgcctgagaggtgctgcatagcgagagatacgtctgctgaataagactggccagatcggcggcaggaacgatattgcggctcaggtaggccgagacaacccggcttgtcagctcaagattccgttgcccgctggctaaccgcggttggttcaatgttcttctcctgcatcttccgtcacttagatccgtccgcgcaatttgcagatatttcggtcagaaggaaggccgacagggagccggttgatttttgccgagagtttttctttttgacgcgttggtttcaccgagatcattctcgtcgcgtaagcaggccgctgctcggaacttgaaccacggccgagcaaacggccatccggtcgaaaaacccgcgtgactttagatacgcaaagttcgaggcgacgctcgctggtcgcattcggcttttggctgctctcgatgatcacgggcaccctcacagtcaccgagtgcctatccgcctcccagaaccatctgtgcggattccgaggcaagccgcccccgcattccgaaatcattccgccccccaattccgagaattagtcgccccctgattccgagatgatgccgccccctgaaaggggtcgtttgtcggggtgtcctgctggtgataccaacgagcggtgatcatgaccgatgcgcccattcgcggagtccgatggacatgatcttccacggctggtcgacgagcttgttccatgcggcgcagcaatgggtgacgatgtcgtcgtagtccttgaagatacggttggagagccagttgtcgcgcatgaactgccagacgttttcgactgggttgagttccggtgagcgcggcggcaggaacatcaaggtgatgttgtccggcaccttcagtttcggcgtcacgtgccatccggcctgatcgaggatgagcaccgcatgggcgccgtcatcgacgctccggccgatctcggcgaggtgctcctgcatggcctcggtatcgcaatagggcaggaccaggcccgcgccctttcccttccgcgggcagacggccccgaagatgtaggcccacatatgtggacggctcccgcttgcaagtgttttctgcagatatttttgaccggatcgcttgcttccatatgtgcggccttttggtgtggtcgcacatgaccactggccaagatgatttccgcaacgcgtattcctaacatggtctcgacctttagcggtcagtgggcctaacggagtttcacgcgtcttggatcgtccgatcgcatcatctgctcttcgcttgcaagttcacagcatcagctcacacggtagcattttgtctttgctcaccgtggtggctgaacttttatgatgtctgcgcttggccttctgcctggcgatatgactcgccgctcgtcataagcttccacgcaatccgcgccagcttgttggcgagcgctacggcaaccaactttggccttttccgctgcagcagccccataagccatgcagaggcgtgcctgctgcggcctgttctgacttgctgtagaagagatgtcgcgccaaccaccaagatgctccgcaacatttcgtcgccagcccgggtaatgacaccaagcctgacctttccggcagttgaatggtccttcggcgtcagaccgatccatgctgcaaagtcgcggcccgatttaaacattcgaggatccggtgtcttcatcaagagaagggaggcgcctatcgggccgacacccgggatctcggccaggcgtttgctgcattcatcagcacgatgcaacttcatcaacttttcatcgagcgttttgatctggcaagctagctcgcggtattcctgtccatgcagcgcgaagagatcctgcgccagttccggtagggacgggtcagcggcaatgcgctccaatagcgcttcgatgcggcacatgcctttggccgcaacgatgccaaattccatggcaaaaccgcgaatggcattggcgagctgtgtccgattgcggatgagtctctctcgcataccgaccagcattaacgccgcctgctgatcagccgttttcattggcacgaagcgcatggtcgggcggctcattgcctcacacaatgcttccgcatccgcggcatcgttcttgccccgtttcacatacggcttggccagttgcggtgctatcaactttacttcatggccgaacgaacttaacagccgtgcccagtgatgtgacccaccgcacgcttcaagtgcgataatggtcggcggtgttttctcgaagaacttcaccatttcccggcgcgacagcttcttacgaaggattggctgctcaaccgcattcacaccatgcaattggaagacgctctttgacgtatccataccaattcggataatctgttccacggacggtttccctcgattgagaacttcaacgaactcattctggcacattcgatgccgttgggagccgtccacctcaacatggtgcgctgatccaagggcgcggatggtctggtgccacgacgcgcccatcggcgcgtgatcttgttcttctggcctatgcgcgcttcgtcggcccaccagagttcgatgtccgtgccttgcgggagccggcttcggatttccgccagagcggcggggaagtctttttaaaagcgtctacttccagctcgttctgagcgtagtggcgtgggcgagccgacagcttggcaaagccgagcgccttcaactcgcggccgaccgtcgtctcgtccatcgagatgcggaattcctggaatatccactgaaccaggtccttgcgccgccaacggacaacaccgtggatcgccgggatcgggccgctctcgacgacctttgcaagagcctggcgctgagcggcattcaacttcgctcggccgccaggcgctttgccattcaccagtccatcggggccgcgcgcgttgaaacgcaggacccaatcccgcacaatctgcagcgtcacgctgccgatccgtgccgcatccgagcgcgggccgccgtcatagatcgcggcaagagccagcaaccgccgggcctgattggcatccttcgtctgccgtgcgagctgtcgaagagcagctccgtcgaaatcatcacgcaacaaaaccgccgaacccatcgcaaacctcctgtttgcagcatggattcagattcgcgacaccttgggaatcccatgagagtcagaaacggcgctcgttggtatgagacgttcctcctttcagtgtcagaggggaaggaacgggatgccagcggagagactaaagatgcggcgtgtccgcgaggttctgagatacagatttgaggaaggccttggccacaagtcgattgcggtgcgcgttggagcggccccctcgaccgtgcgcgagacgttgcgccgtttggagcgtgccggcctttcctggccgttgggcgacgatgtcagcgatgcggtgttggaagcggctctctataaagctgccggcacgaagaccggtcatcgtcgcagcgttgaaccggattgagcgcatgttcatcgcgagctgaaacgcaagcatgtgacgctgcagatcctctgggacgagtatatcggccttcatcccgatggatatcgctacagccgctactgcgatttgtatcgcgcctgggcactgaagctgccggtgacgatgcgccaggaccatgcggctggcgaaaagctgttcgtcgactatgccggcgacacggtcacagtggtcatcgacagattgtcgggaaagacgcggcaagcgcacctgttcgtggcagtgctcggggcatcgaggctgtcattcgcccatgctcgctggagtgaaacacttcccgactggattgaatgccacctgctggcgcttgaggcctttggtggtgcgccggcgctgctggttcccgataacgccaaggtcgccgtcatcaaggcctgccattttgatccgcaggtcaatcgcacctatgccggcatggcagcgcattacggaagcgctgttcttccgacgcgaccgcgccggccgcgcgacaaggagcggacatcacgatgcaccttgttggagtggttgagcgacaattaatctgggttgacggccaccatatcgactgccggcgcctttttcgagtctgacgttgcccggcggttcgtacaagtatcgatggttgctggcgtatcgatgacgcttgagagtgcctttgcgcccgagttggtgaacggtcgattcgcatacgccgagctgctgggctacttcctcgccggtgagcatgccgccctcgcgcagccgttcgtaccggctcttcaaaccataggtgcggcgcacgagcatgaccttcttcggcgtgaagggttcgccgcgccagttgcgatgcccgagttcgttgagacgagcggcgatctgccggtcgttggtggcctccagcagctcgttgatcaacgccacgacctgtgccggcgtcttgcgtatcaccgacataggccgaggtctggccaccgacaggctctgcgtgcgcccgccgcgccaacggatgttgatgttgacctcatcgtcgacgagcagcgtcacgtcttcgatgagaaggccgagcatgcgcttgcgttcgacggcaccggtgcgctcgtcgttccagatgcgcgggaaatcggcggtcagcgccctgatgcgctgctgcgctggctcgtccagcagcgagtggtcggcctcgttctggcgctcgtgctcgcgctggagtgcgtcgaggtcgcgcagccgtgcgttccagtcggcttccagcgcgtcggcgaccaggcggttgtccggatcgaccttcaggtagcgccggcgggccagttcagcctcatagcgggcgcgttgcagctgcgtgccgcgcagcgccgcggcctgctccacgcgctgggtgatctcctgctgcacggcaagcgcgacatcgatcgctgccggcgccattacctccagcagtagcgcgctcaccgcctcgtcgaccggagcaccgcgcacccattggcagtgtttgccggcgtgtcgcacgacggcttcgttgcagacgtaatatgggcgcagccgcccctcgaacggctcgtaatggacccgcatgcgtgcaccgcagcggccgcacagcagccgtccctgcaacaggccgctgccctggcggggcatgcgtccacgcaggccgggtgaaaaaccggtggcgttctgttccagggctgcctgattgcgttcgtattcggcccaggaaatgtagccgtcgtgggcgtcgggaatcagtacctgccagtcggatctcgccacgcgcagttgcacgggcttcagcttggcattgtaggcggtgcgcgtgcgtccataggcgaaggcgccggcatagcgcgggttgtgcaagatctggagcacgcgggaatggtcgatctcgttccacaggacgtcgcccttgccgatgccgcgacggatacgccgcggaaagaggatcttctcgccccgcaggcggcgcacgacggcgcaggccgagccggtctggcggaaagtatcgaacaggagccgcaccgtgtcctggatctgtcggtcgggatcgagcacgacccgcgcgtcaggggtgtagaccaacccgatcggcagcggcatctcgagttcgccgcggcgcgccttgttgagaatgccgccttgcagccgcgacttcaggatgtgcagttcggcctcgctcatcgtgcccttcaggccgagcagcatgcggtcgttgaaataggccggatcatagacgccgtcctcgtccatgatgagcgtgcgcgacaaggcggccagctcaaggagacggtgccagtcggcattgttgcgtgccaggcgcgacacttccagccccagcacgatccctgcatgtcccatcgccacttcgctcaccaggtgctggaagccgtcgcggtcctgcgactgcgcgccggagaggccgaggtcgctatcgatgacgtggacacgttcgatcggccagcccagcgccacggcgcgatcgcgcagggcgtattgccgcttggtgctctcggtgttctcgaacacctgacgaagcgaggactgacgcacgtagaggaatgcatcacgccgcagatggtcggcgtcaacctttatggcgatgtcagtagacatggttccctcgggtctctgctgccagcaccatgttggcgagcatgtgcacgagctggcgatcgtgcactgcgaccgaagccgtaggccgtgattccagccgccgatgcgtcggcgggggaggctgcgcgatcagcaccgccagcccttgccaaaggccgtggaaaacgatggcgcccatgtccttggcgcaggcctgaccgcaaaggacggcggtgcgcagcgtctcgtagaaatccttgcagctgcgcggtagcaccggggtgcgtgcatggggctcaccgtttttttttacgggcgatcgcgcgttcgatgctgcggggatggacactgatgccgagcgtcgaatgcagcagttctgccagggagcgcgcctgcagcggggcgcccgcatgctggttctgctcgatgagctgcatgacctcgtcggtgagtttgtgggccgactttggccctcgggtgcgcggcagcaggccggcaatgccgtcgcgttcgaacgcggcctcggcctgatagtaggttggccgcgacagaccgaaaagcgcggcggcatcggccttgttgacgccatcctcctggacgtgacgcagcatctcgtacttcacctgcacgagatcgagaggatcgaagaaggtggactcacgaaaccagggtgcacggacggcttcgggccgcgcattgagtgctccgagctcgcgcagtcgctcacgtttggtctcgttgggcatggcataacctcttcctagtggtgtaaatcaaattacgcctcgatagagaacgtgtcaacctaacgacgccgggcgatatggctgtttatgctgcatataactacaatgtagaggcaattatcgctgtgagcgcccgtatgattcggcataattagatttacataatcggcataaattgcctgacacgcattcagccgccatggctgcgctcgatttgctcgatcaatgcggctagggttgccagatcatctggacgcacgaacgacctaccggccgcgatctgaatgaaaacatcgggtgcagcgacgtccgtccatgacgcaagcagcgagcgaagccgcccatccgcgtcgtagaacatgacgcgatcctcgccccagttctgcttgcgtgtcgacaacacgaagcgctggccgcgccacggatggaacgggtgcgtgacctcgaactctatacgcacttgagtgtcagtacgaactgcagtcctggacttgaaagaaggcaaaagtcgaagccgcggttcgcattgtcgagcgctggctacttggccgattgcgccaccgcgtcttttacagccttgccgacgtcaatgcggcgattggcgaattgctcgtcgatctcaacgacacccgtgttctgcgccgtgtcgggcgcacgcgacgccagttgtttgaagagatcgaccatcctgctctccggccgctgccctccgaacgctacgtctttgccgaatggcgcatacgccgggccggcctcgattatcatgtcgatatcgacaaacattactactccgtgccctaccgatttgcccgcgagcaggtcgaggcgcgcatcaccgccaataccatcgagatcttccacaaaggtgagcgcatcgctgcccaccgccgctcgagtggcaatgggaagcacacgacaacacccgaacacatgccatcatcgcatcgccgctttgccgactggacgatagagcgcattagccgcgaggcatcggcaatcggatcggatgttgccttgctctgcgagcgtattctcgctgatcggccgcatccggaacagggcttccgggcctgcctgggcattatccgcctcgtcaaagccttcgagcgcgagagggtcaatgcggcctgcggccgggcattggaaatcggcgcgcgaacctatggatcggtgcgctccattctcgacaacaatctcgatcggtcgccagcgtcagccggcacagcctcgcctgaacccatccaccactccaacatccgcggtccacgctattaccactgaggagaagccatatgcttgcacatcccactcttgataaattgaacaccatgggcctgaccggcatggccaaggcgttcagtgaactgatcagcaacggcgaaagcgagcaactctcccatgccgaatggctcgggctgctgctcgagcgagaatggagctggcgctacgatcgcaagcttgccgcacgtctcaggttcgccaagctgcgccaccaggccgtgccggaggatgtcgattatagaagtgaacgcggtctcgatcgcgccctgttcatgaagctgatcggcggcgactggatcgatgcccacgacaatcttgccatttgcgggccgtccggcgtcggcaaaagttggttggcctgcgcactcgggcacaaagcgtgtcgtgatgatcgctcggttctctaccagcgcgttccgcggctgtttgccaaccttgctctggctcgcggcgatggccgttatgcaaggctgcagcgaaccctcgggcacgtgcagctcctgatcctcgatgactggggcctggagccgctcaacgagcaggcgcgccacgatcttctggagatcctcgaagatcgttacggacgccgctcgacgatcattaccagccagcttccggtatcagcctggcacgagatcatcggcaatccaacctatgccgatgccatcctcgaccgcctcgttcacaatgcccaccgcatcgacctatccggcgaaagcttacggcgaaaccagcgccggaaatcttgactcgcgaccacgatcaactgacaacaatgacagccagcaggaccccagcctcaagggggcgagatcatcccggaatccgggggcgcaatcatctcggaacaaaggggcggcttcatcggaatcggcaccatctgatagaaaagacgccgaggcggcgtgaaacgcgaggcaagaggtaaccccgagatggcataggctgtcttcgtcaaatattcgattgcaacttccccggttgcctcctaattaagccgccagacgcctgtgccatcggccgttggattatattgttcttttccagatttagcgggttacagcttttgtccacagaccagaaccatttgattttcttcatggatgatttcggaacacgtacggcttgcaaggcgaccgaaactttgcccatgtggtcgcatgtattcagcttcggcttgggtggaatcatcgttccatcggaggccgttcacgaaatctccagcgcgaccaatgacctttgcgcaagatgggatgtgcccgtgctgcacggaaacaagatcagaggggcgcgagggagctttggtttcctgaagaaagacgagaacaagaaagcgcggttctttcaagagctggaagaaatcctgatcgacgaccggattaccgcccatgcttgtgtcatctgtcggccaggctacagagaccgctaccatgacaagcgccctgagggtgtccgttgggagatgagccggaccgcattcgatatatccgtcgaaagggctgccaaatatgcccgttctctcaagcgtaagctttcggtggtctatgaacgaacaggagaaaccgaggatcgattgattgaaggttacttccagagattgcggacaaccgggacagagttcagcgttgaaaactccgctcaacacagtcccatgtcatctgccgatttggctgacacattgatgtcgatctggccagacggcaagggaaacccgatgctgcaattggcagacttggtggtccatccattggggcatcgcccaacgggtcttaggaatagagcatatgaccgcttcgcagagtcaggccaacttctagactctcgcaccgatgatccgacgatctcgattaagtattcgtgctacgacgatccgtacaaggaatacgtggctcctgaaggaaaccccagaaacacataagggacccgaaggtcccttatggcggttagcgtaaaagcaataaccccgtggcaaagccataccataaggtagataagtcctgtgccatttgcaaggcgtttgtgaattttagccaaaaatcgctatctccttgaattgtggttttaaagactcttgaacggcttcacaggccgacggtaagaagcgcgtgttgtcgatggctttcgccctgaggcgttctccacgcgcggtgcgcctcaagacagtccctgccgttcgaaaaaatgaaagcgggcggccgttcgatatccggctatcgttctaccgtccgcaggcactttggtttccaaccagtgcctttcgcgcccgacaacgtcgccggagggcatactgatcagggcattaggcgcaggtagtatggtgattcgctcggtgggccgaagtggccaaaaacctgcgcgattgttgcctgcgtatgctcgtgaaacaggttcagcgacgccgagagcagcgtcgaggatggcgcagctcagggctaccagcttcgaccaccgtaaggcaagctaatattaggtggattgctgcgcggtcgcattgaaccagggttagacaattgaatgcaatcggttcccggtattggctaaggtagattctgattggcttcgccaggttgacgcccgttgcgcggtcgccagccgcatcagcgcaaactgacgcaagggcactgggcaaatccccatctgacctcggtatagtcgatgttgacgttgacgtattgcgtcgaggggcaagaggatttcagctcaaggaagtgctctttgaactcgatctgccgcagaacgattgctccgtattcgtaatatccgcctgccccattttcgagaaggtaactttggtaggtgcatgtcagtgccttgtattgcggcggcttgccattgccgctgaaggtgaggttgcccatctcggtgaggaagatctggaaatccatcagcagcgatgcgccatctgtgatgattgcgttggcaagcaaggagagaaaggtggctgcgacagaggtgccggcaaacctgttgcaaaactcttctgcttgtgtctgccgatcgaaacgtcggggatgttggcaacaacgtctgtccaggtgttgatgtccagtttttgtgaatcgatgatggaataatgggtgtgcgcgtagtcgtgaatgagtcctcctatcgccagcaggttgtcctggttctcattcataatgccgttatagatcggatcgttcgttttctggccgatgaggtgaaactgtactgccccttgatcgttcgcgatcgtgtcgtcactggggggcgcagcatttctctgggccaaaaccaggggcttgcggcagaaaagcgctctcgccgcctcgtagttcttgtctgaatagccctgtttatgctcgtgagtatccactgcaattgcgttcgacatgcttttcctcgtggggagatctgagcgttactgtaagatccgtgaggtgccctgaacgcgcaaagcctgagtgcgagaacattttgggcgtctgttgatgtataccaggtcattccggtctccacctttgcgtcaggcaggcttttctctgcccgcgaccatttttgcgatagcgtagcggcgagaggccatgaaacgccctgaaagctgtcgagaagttgttgctgttgtcgtaccctagtgactctgcgacggcggcgacgctttcgtggccgcttcgcaggcgcgcggcagccatggtcatccggtagtgccgtaaccaagtcatggggcgcagttaaaggatgcagcaaagcgcttattggtgccgatgatgcgagccaatttgctgagggtgatcttctggtcgacctgctgtgcaagcaggtcgcatgagtcctgcaccatgggatcagctgagaagaatggcggagcagaacgccgagcgatctcggcggcgcaggcggtaagtctgctcagaacttcctgctcgataggcggtcacagcagttagtcaaagtacccgttggagtaaactgcccttcgatacaggctgccttccgcaaccaaggctagttgcacgagttcggatgagagctccgtacgatcgtgattgttttgcggggcgcgacaatccacgatgacgagttccgccgagcgtcctggccgcaacaaacggtaatcaacgatatcgaccttcggcagagagctcgcgatttgggccaacgacgtacatgtgaccaggtcggacccaaggtacgctcccagaatggatgcatgcacctttggcccaccctgaggatatggcctaccaattggcttggtgcggcgcacggcagttgacgaggggagacttggattgtgtagatggccgaacgtgtgaatacgcgctcgtttggcagtttgccgaaaaccctcgattcaaattccggctcgcgataggctcgcatcgagctcgttgtattggcgcagcggcgtcttcgccggccggcgcatgaggagagggtaaccaaccgtcgccgatatggaccgaaggcggccagatttcggactcattgcctggacgcagcatcggtcgactgcccttgctctgttgccgttgccgcggcggcgatctcctggcgcaaccaccgatggtccgggtcgcgatggcaacgctcgtgccagatcagcgcgacctcgtagggcggcagttccacaggcgggtcgacaatcactagcggcagcaaggcggcgttcctggtcgcgacgcggcgtggtacgaccagcaccagatcggtcgacacgatcgccaatccggccgtcaggacattggaaaccagcaccggatcgggatcctggagatccaacttgaccagatcatcatgcacccggccgaaaccgtctttggtatccgaggcaatggcggcgtggcgcagggctgagaaggtgtcgattatcgattcctgctccagggctgggtggccgttgcgtagcaggcaagcaaagcggtcgttgtagagcctgcgccgaaagtagcccggtggagcctcaccgatctggccaacggctaaatcaatttcgccttgctcaaggcgtcggagcgctaggagcgaatcggtcactatgtccaggttaggcgcgcgctcgcgcatcagcggcaggaaaggcggtagcagcacgatcgcttgatgatcaggcattgccattcttgccgttaatcgccattctccctgatcaaggccggggtccaccatcccgcggatcgaatccaacaccggcggtagcatctggcccaggcgttgggcgtgaggcgtcggaaccatgccgcttgagccgcgaaccaacagatcatcattgaaaacgccacgcagcctgatcaaggcccggcttaccgacggttggctcaggcccaggtgccgggctgcctgcgtcacgttgcggtgctcgagcagcgcctcgagagccaacagcgtgttcaggtcaagcgatgccaacatttgccgtcgccgtgcggcgcgagggccggcgacgatcagttgcggccgctgccattcgttcgaggtgccattacaagcgggctcatccacgagcctctccttctgtcttcgtacgcagtgtgctcaggctaacgtctcggagaactggcggtgcggagtagcccgagcatgctgagcacatcaggggtttctccagccggatcgacatcgtcaaaacacggcgtcgattagagaggtgataactggtcaaacgctcgacccttcagtgccggcgacgagcgcatttctgacgtttggccggttaccgctcgacgctgttggaggcgatctcttcgggccggcgactgagccggcgcatttgagaatgcggagaggatcgcctcaacgagcttgattatctggcgcaacccgtgagttctccccgcggtctgcgccatcgccttacttcgtcagccgggaaactggtctgtcttcgccttcgtgctgtgaccgcgacacattcaccatacttccgcaagacagattgctggctgatttattttacccagtcgcggtcagcctgcaactggcgcggccgcgtccaacggcgccgccaaacctcggggtggatccaggcttgcgaggaagtcgtggcaccagcgatagacatcgtgctcacgaagcctctccatcatcgcggtccatcgtctaatccgctcatctcgcggcatgtccacggccgtttctatggcgcttgccatgtcctccgggtcatagggattgacgaggatcgctccttccaactcactggaggcaccggcaaagcgcgagagcacgagaacgcccgggtcccggggatcctgcgcagcgacatattccttcgccaccaggttcatgccgtcgcgaagtggcgtcacaagaccgacgcgtgccctgcggtagacgcgcgccagttccgcttggctgagcgactgattgatgtagtgcaccggcacccacccaatggttccgagttccccatcgacgcgccccaccagctcggcgacgtccttttgcaccgtctgatatgccggtattttgtcgcgggatttcggggtgatctgcagcagcactgtcttgcgcctgcgatgtttgttgcgctgtaggaatcgattgaaggcgtcgatgcggttctcgatgcccttggaataatcaagacgatcgacgccgatggcgacgtcaaatccagcaagcctgcaaaagcgatcctgcagatcgtcgtcgcggtctgcgagacatgcgaactcggccgtatcgatgctgattggaaatacgccgcagcgaaattcttttccataggctcggcagtcatctccgttgagatcccccactttctgccggagcaggcatttggcgaagttgtagcgatcgttttcggtatgaaagccgacgaggtcataacacgaaagcccgcgcagcaggttatcatagctcggcagggtgaagaggatgtcggccggcggccacggagtgtgcaggaaaaagccgatccggtttttgtggccacgctgttgcaatttctcagcaagcgggatcaggtgatagtcttgcacgggactgtcaggaattctgtgcggggggccatgatgatgaaaaggagcgaatcatcacatggctatcgaaaaagaacttctggaccagcttctcgccggtcgtgatccatccgaggttttcggcaaggacgggttgctggacgatctgaagaaagcgctctcggagcgcatcttaaatgcggagctcgacgagcatcttgacgtcgagcgtagcgagggaacagccgccaaccgccgcaatggctcttcgaagaagacggttttgactgggacgtcgaaaatgacgctcaccatcccgcgcgatcgggccggcacgttcgacccgaaactgatcgcgagatatcagcgccgctttcccgatttcgacgacaagatcatttccatgtatgcccgcggcatgacggtgcgcgagatccagggccatctcgaagacatctacggcatcgacgtgtcgccggacctgatttcggcggtgacagaccaggttctggaagccgttggggaatggcagaataggccgctcgagctttgctatccactcgtgttcttcgatgccatccgggtcaagatccgggacgaaggtttcgttcgcaacaaggcggtctatgttgcgctcgccgttctggcggacggtaccaaggaaatcctcgggctctggatcgagcagacggaaggggcaaagttctggcttcgggtgatgaacgaactgaagagccgcggctgccaggacatcctgatcgccgtggtcgacggcctgaagggtttccccgatgccatcaccgccgtctttccccaaacgatcgtgcagacctgcattgtccatctgatccggcattccctggaattcgtgtcctacaaggatagaaagcccgtcgtgccggcgttgagagccatttaccgtgctcgggatgcggaggccggcctgaaggcgctggaggccttcgaggagggttattggggtcagaaataccctgccatctctcagagctggcggcgcaattgggaacacgtcgttcccttcttcgctttcccggaaggcgtccgccgcatcatttataccacgaacgccatagaggccttgaactcgaagcttcgccgagctgtgcgctcgcgcggccatttccctggtgacgaagccgcgatgaagctgttatatctggttctcaataacgccgccgagcaatggaagcgcgcgccgcgggaatgggttgaggcaaagacacagtttgccgttatcttcggcgaacggttcttcaactgatcaaaccggccccccgcacagaattcctgacagtcccgtcttgcacccatatgacgtcgtcctcccggagggcctgctccaacagatctgcgaaaagttcgttgacgcggtaatatgcggactcccgcgtctcggaatattcagcgaggtcggcacggttgtggaagatcggccaaagaacctggttggcgaagccatagtagaattcttccagatccgtctgcgagagatcggtaagcgcgtaagtgatgccgccgacgtcctttctgatcaacgctgacggttcttcctcggctgcgaccttgcccgaccatcccatccagacaccgccctttcgccggagtgcggcgttcaatgcaaccgccatccccccggccgacgacgagccgggcagggtaaccctgttagacacgacgatcagtctactcatttcgacctcccgtcgtcgcacacgccggcctatccatgcgaacgcggctctccagttgttcagaagttgctggccagggtagctcattctgcgcgaccacggcagccatgtgcgtaagcatatacacatcagtatctcgtattgagagaagatgttttgatgatggtaacaatagcttcattagtagacttttcagatgtaggttagttggcatgtcaactaataatagtactgatagtttgcatagtaaggctcgcaaaatgcacggctccgtcaacttttcccaggtttcaagtgaaataaagctgagccggattagtatgtttcaaaaaacagcaatcaagcgtgcacagatgccaacgatggggctaaaggagcggaggcaaacgagactcgtaggaagagggtctcccacaatgttggtgtaccgcaccagcaatactctacgttaaatcagcagaacgcgaccgccgaagaccagcggccttcgagagctcagttcccgcgcaacagcagaacgctccgcatagccctatttgtctgcgctattctgctatgcacctgatgatgattgccccactcggtggccgtcctcattttgggagtgatggcccaggaggccaaagctacagcaggagtgactatgaaaaacattctcgttatcagtcaggacgcttcgatgaggtaactgctgatggagttcttgccaaagcatgcgtttagcgtcagagcggtggaaaacggccagcaggccggtagcaagatggcttccgaggtgattgatctagcaattattgatatgagcctccgccgagaagatggtcattggctcgtcggggattttggcgcaaagatagaccttccaatcatcatcatcagcggtgacgaccttgaagagggtgacaacatcagccgactccacaccggcgccctcgactgtatctccaagcccttcggcttgccggagctcctgacccgcgtgagcgccgctttacgcgatcggccagagcgtcatcggaacaggatcttccatttcgatgactggcgcgtcagcacgaagcgtcgccgtttgcgccgagggaccaatggtgaagtcaagctcactgcgggcgaattcaacctcctgatggcctttctcaacaatccgggcaggtcctttcgcgcgagcagcttttggtggcgacgcacgtctatgatcaagaggtctttgaccgcagcatcgatgttaaaatcctgcgccttcgccgcaagctaggtcagcacaccggctcgaacccgcaatatattcgcacggaaaggggcgcaggctatgttttcgacagcgtcgtgaacgttgacgagttgaggacgcgcggccactgacagcgcactcattctattttgcttgaaggtcgcatgttcgcctcagggcggttggggcgctggatttccatcaaatcctctcgtcagatgaacgagagctactccaaccaagtgtctcttctgggtgttgcagtggcgctccgtgtcttaacgacggaccagaatgccccggtttaaaaggctccaagcggcggtccggcgctggagctctcgacgttgccggccgtcaagaccgtaaagccggcggactgccaggcgacttcattaaaagtcgcttgtagagacccacagtccatgttgagaaggggagatattcgccggccgcacgctcaattgtcctcgcggcgacgaccggcgaatgtgcaagagaattcgattgcgcatgacgccggtcccgaggctgtcgaagcgaagctgaagacacgttggcactcccgtccgataatccaacgcaagcgtttagcacacctgagccggcgtcaacgacgccggagcgagcttgctgcaccacgccattcgccgggggctgaatgcttgcataagtgagtggcggcagggcgaaagctgcgcgaggaattcacgagattgagtggcaagctgctgtcggtcgtgcgcgacgatcagtttgccggcggatgggctgggcctcgatgatggcgcagatgcagaacattatcgacttcccgcccgcgcccaagctggacgcgtctggacgccaagccgggcgagcgagcagcagcgagagggcgaacgggtgtttatgagagtccgctgcaccgttcgccacgcccccgcagaccgccttcatgtgcaacaacatgcacgacccgaagctcgggcgcttctctaatatcagcccgacggccaacgatctcgtgatgttaccaggtggtccaaccaaaaccttcacaccgcgacgctgcgtggcatcaaggacgctccaccctacttgcacgatgggcggctgataacactcgccgacacggtagagttcagctaggtcttgtaggtggagatcgtggccgcggtggtttccaccctttcgaagagaagcgcccgacgtgttaattgtccgatccaggcatgaggcagccagttctcgggtccgccacataggaggatcatgactggtctgggcgctcgcgcttctggagagcggatgatcgttctgaggcagcgacggtcggtccagcttggttcgccgctctgagcgttcggatgcgtgtgccagtcgccaatgtaggtgtctacacggcctgacacgcgataatgacggtcgatctcggattgctcccattcacggtccggggaaaagcttttgcgtgtgcggatcgcttccgatccgccgtcaatcatcttcgtgattaccgcgacattcgcgtccgaccagtatcccataaaggtcccgcctgtttcgaggtcgtgccaacggctcgcgtctttcagcatcgcttcgacgacggactccggtatccaaatcagcttcggcatccgcagtccgggtgtcgttccagtggatcgatccgccaactcggcggcatacgacgttttacgttatgcagattgactgtgcggacctcggataccgtccactcatccgggctagacaggacatcgacggccatccggacggtctccaaggacagttccttcaggtcgaatgaagctccggtgaaggtgagctcggagcaaccgggtggctgaacgagcgttgattcgtcattcatgccgttcggataggggatgtgccccgactttccttccggggtctcgttggcgtgcgccatgcacaccggacaaccggattccggatgatggaatacgaccgccccgccatgcaggttgggtgaggcgaaaacggagatgagcgaaaggccacgctcccggcagatgtcgccgagaaggtaggtaacgcccggcgcggcactggcgtccacaacgagatcgacgctgtctaataactcgttcagccgatctgtttctccgggaatgtgcggatcgcagtttggtaatccaatgcggtgcgggacggccagaacggacgtccatggaaattcccgttcgatgaaccgcttcaaggcgtcctgcttcttcgttccccaactactggctccaagttcccaacggatcgtgttgcccggttcgacgacgtcgtcgtccatcaggtggagcgaggtgcagccgtttctagccagttcgacggcagcgggtgatcccagcgccccgagcccgacaaccgcaatgcgtttgcctctcagactcgcgaccgatggaactcgatagccgatgtctatctcgccgtcccgaaaaacaggcacgatggacgggaccgtgtctttacgtcgtggtcccctacgacttgagtgtgaaatgtgctctcttaccgccattccgcacacccaagcatctccatgctcgttgtgttgaagttcggtcctgctgatcgtgaatgagagccggatatctgctccgtcgcatgtcacatatgttttcccgtacgcgactttgccgaccgtctgttcagcagaacctgttggtagggaaagttggtcgtcccgccgccaagggaaggcgcgaatggcagtcgaagaaacggcggcaggaagaggcgcaacacgctcccccaaaagactaccgtcaccggccctgacgcttaagatcgcagccctgatggtccggccgatttctgtccggcttgcgttcacgaggacatcgacagtcccttcgtcatagccggagagcttccatctggagtcaacgaggacgaagcttccgctcgcttggccgaggctgttccaccaatactcgatcggctctccttgtggatcctccgctcccgtgccgtccaggacatgcgcgaggttttcgtcgaggagttccgccaatgacatgttggcctgccaatagcgggtatcgcgccccagcagacaaagagctccttcggatccacagtgccgctcaggatattcggatgggtcgcaggtcagaaaaacatgggggcgcaggcgtggaaaggtatctggataaactgcccgcagcccaatcgttcttccgtcgttcaatggccatgaaaactcgattcgaaggattccggcagccgccgcctcttcatctacgaggaggctctctccagcagcagaatgaagcttttgaagttccgccagcctcctgcgccctgctggtgtgacagcaagagcaggaggtggctcaaagtcggtgtatggcttcatgttcaaccaacgtgcttcggaggcactttgggtggaacgcttggacccggatgattcggcggaccaggcggatgaccgggatgaccaggatgatcgggattgccgggctcgcgtcccggattgtcagctttgcctgccatctgaggctccttctttctgcggtcggtgctaagttttagtgttgttcgactaggcgtcttcaggcacggtgaacggcttaagaagcgtatacctggttggtattccatgcgaagaacttattggtgtatccgtagtcggccgattcgtcgaaaattgcgtcattcatgtcgagcgtccgtttcagcttggtagctgtgagcccaggactgtgttgcggccccttttcgctgatgtctttgatattgatggtcacggcttgtcctcaattgacttactaattgggccgaggaccttgacgagccagcctctcaatatggagcgactatacgaccgcgcctaagtcagatttcaccatttatagggtggaagacgcaggatatcagcaacttttcagctggcccgcagggttgctgcaagtaagtgcgatggccccaaaaggtgacgcgatccagtcggcggaaaggaccagggcgttagtactgcttgccgcgacttgaaggcgcagcccgtcggaggaggagctcgcatttttcggtcgggttcacgccgacgcgatgccgcgtccggcgctgtcggaagcaatgcgtgtctccttccttgggacggcgccgttgccgaactcggcaaagatggcagcgatgaacgacgcttctggaaatacaggacgacgcccgcagatacatttgagctgcgcgtgggcgtcgctgcagccgagcaagctgcgaggccgcgaccttcacgtacaacgctgttgtgttgatgctgcgatgtacgagaagatcggcgacctcgttgatcggccttcggatgtgagaagttgctgccgaacgggtaccggaggtcacgatagcgacacccgatgctcgacagcatcaaggacctgctcagccgtcaacgcctcgaggttttggtagggatggtgatggcggaaccaatccagaaagcgtcggccgcgcagaagaacgccttcgcgggtgttcggctccagccccgtaccctatgcagataatccaaaaaggaggccagaagcggagcatccgggtcaacctcttcacttgcaacggggagccacccgccgtgcgtgccccagcgccgacacggccccaatgcgcggaggatccgtactaaacgcgcccaaatagcgttgacgacatggatcggcatcgaccgcagtgcgtctcggcaaaccggctaaagcgcgcaattcggctcaggtaaatcttgccgacgctcgcttgtaaccaagcgtgaaaaaatattccgcgaggcgatccatctcgccgcggagcgcaccactactagccgcttgagcaccccaccatacgaaaaatatgactcgagcataccgcccctccggcatagcggcgcagggggatcccgcgcctacctcagaggaaccaatcttatttcgaccaccgcgtccgccgcacaccgcaccggtgtttcgcagctcgaatgccggtatggagcaggtcggccgcgccgagcgtcacaacgccgtggtcgcttaacttcccacaaaaccctcgtgctctccaggcatcatacagtttctcctgggtatcgccctcccatgttgccgctgatgcaccagatagttggccgcgagagcccgcggctcggcccagacctgacatcctgctgtccctcctacgctcattcggtttgcagcaccacgtggaacctgccgcctcgtgccatgaggagtcttgaaaaggcgccctgttcacaaggaagcgcctcggcaggttttggtcagtgcccatgcgtgcgttcagccgtaggtagttaatcggaactggacctgaacgcgtaattggccgctgctagatcaactgcatcgttcaccgttctcacacgttgaggttcagcacacatgaggtgcatcgggtgtgcatgaatacccaaagcggtttcaaagaactcgagatcgtcatgcgcgcgataccggcggtttctagcaatggcccgaacgaatgcagggtcaaacttataaacacccattagattccaatctgcagaggcgtgatgctggcttgaagggcggtcgggtagcactgctgtaaggcgcagcgcatcgtccgccagtacgcgcagggatcgtccgccctgtgttttgctgactacggcaatattgcggtcttgcgaccgcaacaggcgttcgatcacatcgaagtctatgaccaaattctccgtgaacaccagcacgtcgccatcaacgtgggcgatctcatttgccgttgctgcgtccacgagacgtccggcattcggcctgggcagagcgcgtaagcagagctccatcccattcagctcgccaccgaggtcgccggctatttcgcctaaagtttctcgggccagcaccatcgtcctctgcaccccagcgtgtgccaattgagataataagcgtcgcagaaccgacgtgccgccaaccacacctagagctgctgaaaagcgcctcttacacgtcgagatcatctgttgtgggtcggtaataacaatccccaagctctgaacttcgcgcatttcgtcgatcctcggactgagaacttcctcaaaatctatctgagggcgagcgttctatctactaccagggcaaatagtattggtgcgacttcgaagtcggactgtaggtgaagtgcgcaaaagagttgaggtgtattgatgggtcaatgttccgtaagaccgtatgtccttcttcgggagtgaggtggctcgccctagactgttcttccgagggttgctcggacaggccgggccgatcctcataacaggaggacgagccgtggctgattatagagaagcttttgtcggaatcgatgttgcaaaattaaagaacgcgattgcggtcgccgaatccggtcgaaacggcgaggtacgatactggggcgaggtcgaggcgtctgatgcagggatacgtcgcgcgatcaagcagatcacggcgaagtttgaacacgtgtatttctgttacgaggcggggcccactggctacgggctctaccggctgatccgctcactcggccacgaatgcatcgttgtggctccatctttgatcccgagaaaaccaggcgaccgggtaaagacgaaccgccgcgatgccatttcgctcgcccggctattgcgggccggcgagctcacggcggtgtgggttcccgatgaagatcatgaggccatgcgcgaccttgtccgggctcgcacgagtgccgtcgagacgctgcgcacccatcgccagcaggtcaacgcgttcatgctcaagcacggtcgtatctatcccggcaagaggagctggacgatgcgctaccttcgatggctgcaagaacagcacttcgaccatcctgcccatcagatcgcgctgcaggagatggtcgaaacggtcatcgccgaattcgtgccccactggtcactcgctgcggtcgtatgcgctctgcgggccttgcgcggcgtggacttgatcgccgcggtgacgtttgcgacagaagtgggagatgccggccgctttgagagcccccgccaactgatggggtatctcggtcttgttcccggcgaacgatcgaccggggagacaacaaagaggatcggcattaccaaggcaggcaacagccgagtccggactttgctggttgaatgcgcgtggacgtatcggtatccgcctcggatcggcaagaggaagctgtatcgcctcgaagaggtatcatcgtcggttcgcgagatcgcctggaaggcgcagacccgcctgacggcccgctaccgcatgctgagcgcccgagggaaaaagtcgacggtcgtgtgcaccgcagtcgcacgggaactcgccggcttcatgtgggcaattgcaagggaggcgcgacagaccacgtcataacagccgcgcaccgactcgcgcattggcggaggcgggacaacggcaggggaatgtccgttaaccgctttgtggccggcaagtccgacgcccgcagtaagacaggaacagccccagacgcaaaatcgggaatgcggtagccaacccgcgtatcagagcttgatcaccgacgtctttcagttccgcctccaccaatgcgcaagctatccacctcgagcgttcctctacggaacgagcgactcgacgtgtctgcaacgttgacagcggacatcagagcggcaagcagaccccatagccggaatggcgcgtcgtgcgcccgtcgatggcagagcggcgaccattgatgttctgcgccacatggggcgtcaccttcatcgaccgcagatctttaacgaagtcctttgtgtcataggccttgtcggcacccagcgtgatcgcttgtgtccggtcggcgaagtgctcgatcatgtgcagagggcggatgatggcgacgctgatcggatagttggcaagctcgggaccgcgatcgggcgaagtggtcaagcctgatcgttccgacgtcgatctgacaaatgggtctgtcctcgttcggaagaagatattccgcaaggaccgtctcgttccagttcacgcgactcaggctgcccttcgccactagatgcgtgtgcgcaacgtggcttttcttcagccgaaggaccaggccttctttctgagctcccgtggccaccgcctctgtgcgaccggcctaaaaaatggttttgctgaagtccgcaagttcgccggccttgatgacggcaagcggttgcggccgcacgatctgcggcaccggtttgccgtgacccgcctgagcatcaacaacgcgccaacgccctggcgctgctgccgttgctgccacctatctcggccactccagctacagtgacacagcccactatctcactggatcggtggaccttctggcggcggagcgcgccttccttgatgggggcggagcgtgacttcggagctggtcgagaacccaggccatgcgaaaagctgcttgttccgctatgccaggcccatgtgacgggccgctgtgtccgcccaccatccggatgcggaagacaagatcggggtcgcgatcggtcgcgcaggaccgacgctgcgccacgtaacgagcaggttggtaatagatcacttggccatcgtcgagcgcggcgtcgacgtatgtaggtggaagagatcgctcggggctgaggttgtaatacgggtcgtagctgcgcagataccgatactcgtaggcgtcctggggatctccatactctgccgtttcctttagcgtgtacggcattgtcgagtccagctgggtatctatgatgtcggccagtgggacctcggcaaccacggcgcggaacaagttgggccgaaagacggccgttgcaagcaccgtacccccgccaccactctttccctcaataacgacgccgtcgcgggtggcgaacccacgctcaataagcccctcggtagcggagatgagatctgtgtgagtaatgcgcttttggtcgcgggtagccgcgtcgtgccatgggcgtccgagctcgccaccccctcgcacgtgcacgatgccgaaagctacttcgcggtcgagcaggctcaaacgcgccgtcatggaagagggccaagcgaggaacgagggcaatctcggtatcccgtagcagccgtacacactcaataacactggtccagggctcgttcgatcgcgccgcgcgaccaacgagatcgggacctgcaccccgtcttcagcctctgccattacgaccgttgcaaggtattgagtggcatcatacccgggaacgcgggcctcgcacaggaccaccgatcggtcgttggcgaaatcatgctcgatgaaggtgtcgggcgtcacaaacgagctaaccgagtaggtcaacttcgagcttcggaacggatgtcgtgcggccgaatagcaaccaccggccgacaggccgacccttatagtgcagctcggctcgtcgggaacgatcacagcgccaacccgcccgcttcgattacgcgagatcaggcgaggacggaggccttctcgttccaggaggaccaagtgctgttcgagcacgtggatctcgtcgatcgtcacgcccgctcgatgcggcacgacctcctcccaccgcgacggtgagggatcatctatcggcgcactcaccagccgccagtacggtccagcatcatccacccgaaacaggaacctgtcgtaccagtgctcggcatagatctggtgccccagttcacgcatcacgatccggcgccactgacctcccggctcgtcggcgggaagacaccacacctctgcagcccctcgctgaacgtaagaggacatgtccgaggtagtaagtacgtcgaggaataaccaagcgccgctctgagaacgccgaaccagcaccgccagtcgctcgtttgcctcctcgaacaccacctccgagtttcctcgcccgacgttcaagcggacgatctgatgatgttgccgccggtcaggccgctcccgtgtgaaaaagagcgtatgattgtcggcggcccagacaacctgcccgacgctacccgcgtctcgccagacatcgcgtccgtcggacatgtctcgcacccttaactcgtagcgctcggcaccgatgagatcaacgctaaacgctaggtaacgcccgtcgtcactcggctcgaacacaccgagccaatagaagacgtcggccccgggtatcgcgttcgggtcgaggacaagctcggccgaacctccggtcaccggccgccgccaccataccggatgaggcagcccccgctcgtgtccctggaagtagtcaaacggcccaacttggaacggtggcgtggcgccctcgcaaggctgacgcccttcgatctcggcgatgagctcagtctttagtcttctcaggtgagctgtcgcttgctctgcatagctgttttcggcttcaagatacgcgcggacgtcgggattctctcggtcgcgaagccatccataccggtcgacagtgacgtcgtcatgaaggacacggatccgtggctcggcacgcggaagcggtggccgcaggctcttgtcccacatcacaacgctcctgaaatgagaacaagcgtcgtattcatcaccgccctccactaacaagtcgatgcgtcgctgcatcgcgcttaacccgcccatgaaccggagtcgcgatccgctttagatgcttgcggccacagatttgtgcaggatgtccagaccacgtcgaagcgtctgctcgtcagttgtcaaaggaggtagaagcttgataacttgatcttccgctccgcatcgctctaccacaagtccctcttcaaaggccttgcggacgatcctctcagccagcttacctgtaccacaattgagccccaacatcatgccccttccgcgtacggagaggctacgagctcggttggtctgagccacctgccgaaggcgctccgctatgatgcgtcctgtctccatgacacgggcagacagcgcatcattcgtccagtactttcgcaaagcagcggcacccgtcacgaacgcaagattgttgcccctgaaagtcccattgtgttcgcccggccgccaaacgtctaattctggcttgagcagcaaaagggacaaaggcagtccgcagccacttatagacttcgacaagactacaacatctggcgacaaacccgcaaactcgaaactgaagaaattgcctgctcttccgcaacctgcctgaatgtcgtcaacaatcagcaggatgccatggcttctgcaaatccgctggatcgactgcagccactcttttcgcgcggcgttgatccccccttcgccttgcacggtttccagaatgattgccgcaggtacatctacgccactgcttgcatcagcgagcaccttatcgagatattccgaagtgtcgttatcggcaccccaatacccgtcatagggcatgaacgccaccccggctggcggaaagcctgccgcgtcccggtagtatcgattgcccgtaaccgcgagcgcacccaagctcatcccatggaagccgttagtgaatgaaactatgctgtgccgtccagtggccttgcgcgcgagtttcaaagcagcttccactgcattagcgccggtaggaccgcaaaactgaaatttgtaagtcagaccacgtggccgcaatattatggcgtcaaaacactccataaactctcgtttagctggcgtagccatgtccaacccgtggattattccatttgatctcaggtattgagtcgcttcgtcaagaaaatacggatcgttgtgaccgtagttaagaacgcctgagccagagagaaaatcgataaactcgcggccgctctcgtcatgcagaatggcgcctgcggctttctcaaacaccacggggaacgatcgcgaataaaatcgcacgttcgattcgaggctctcgaaggcgtagagtgaattggacttactctcgtttgacatgattttcctcaacaagacgatggcgtcagagcggcgcgcctcatgctcttgaaaccgatgccaatgccacatcggaattttacgtggctccgcggttttacacggcgatgcaggcccacgcgcctacccaggctggcagtatcgtcggtgccacttcttcagtatattcgcgtgttctgatatgactagacgagaaccaggagagtttgcccctggtgcctttcgacatccgatttcctgagagcttgaaactatctgagtcgcactacttattgcagacgcgagaggacatgtagccgccatgcagccagatgcggctcccacgataaagacttggcgctccctccaagatcggttccgagccgagtctgacgatcagccatgtgggtaactcactgccgcggtgcagaggccgcgagctctgaatgcaggctcacaagagtagcagcgtggccgatgttcgaatcacctgtactccctttagagagtgcccgagcctgacgttgcttggtcgcttcttacaattcgataattccaaggcttattgctttaatcgctgcgacggttctgctcgaagtacccaacttccgcatcacgttcttaatgtgaaagttcacagtattttcggaaatccgcataataacccctatgtcccacgaagatttccctcgtgccacccacaacacacactctttttctcttaaagaaagggcaggaattttttggacggcgttcaaattcgcgattttcgcgactctcagatggaaatgggtcgcggcaagttgtaaataggcgattgttctgtcgtggaattcacgctcgcaatgccgagcaaagctcatgatcgcgcagctacctctagggccacgcaatggaacagtaatgccggacctcaagccaaacattgcagcctcgtcaaacatgcgccgctcgtattcagtggtgcttgcgtcactgtacatgtcgctccatcgaatcgggccagcccccattcgactctctttgatgacaggggctatcgtctcgtaacccatttcgagacatcgctcccgccaaccatcaggataattcagaatctcttccgagtcgcatttcactcggttcagagccttatggtcgcttgtaagcggaccataggccagccacttgcagccaaatttaaacgcaaaagccgacaaaaggtcgaacaatttttttggttgagcgacaccatctgtcaggtcgagaagccggccgagctcgaccacatactcgtccctacctgcgtttgagaaatggatcgatcctcccaaggactgatcagaaactccggtggccgatccgcggacttgagggaaactgcagccatccgcgagtcttccacagtctcgctcgagtgacgaatcgcccgccatgtagtcaccggtgcacgacgcggcagccgatgaggcattaccgctctgcgcccccaccggccggtattgcagggcgctcaatgcaagtcgatggagatctggcatcttgctctcctccttcgtccgttgagtaatgtatatcgttgacgagtcctactcgcgtcgccaatgaggttcaaaagtcgtgccaagtttgcagaaagggggcgtcaacgaaattcttgttcgtttgtcagggatttgaacaccatgcagccagtactcagccgcatgccgctacgtcgtgggctcgacaaacgcgacagtagtgtccgttgcgtggttgcactgtgaggctatgcattacgcatcggccatttgcttgtccaggaagccgttcggcaatccaaagcgggagccgcagcctgctgcctcgactgcgaactagtttcagaacgaggcgcagacatagaagctcacatcggctcacaacgcgctacgatatccggccgccacccccttccgccagacggggttcccttgccgctcttacggtcgagatcactttcgcataccacaacggcgacgaggccatactcagggccaaacaggagacttcttcaacagcctgctagggctagctgtaggcgtagacatagatcctcacagtcagagaaatcgtaagcggtcagccgatagcgtcaggcttgaagttccagggcatgagcgcttcgatttcggatgcgggccagccttgagcaatgcgggtcaaggtctgcgagagccagtcgagcggatcgacgccattcattttgcaggtctgcagcaaggtggccaccgtcgcccaggttcgtccaccgccctcgctgccggcgaatagactgttctttctcgtaatcgtttggggcctgatcgcccgttcgacgatgttggagtcgatctcgatacggccgtccgtcagaaagcgctccagcgcctcgcgccgggtgagcgcgtagcggatcgcctcggcggttttggattttcccgagaccttgcccagctccttttcccacagctcgaagaggctggcgacgatggccgaggacttttcctggcggagttcagcgcggcttgcggcatccttgccgcgcacttcatcctcgagcctccacaactcggtcatggcgatgattgaatccgttgcggcttgcgagaccccgctgatgtgcaggtcgtaaaacttgcggcgcaggtgcgcccagcaccctgcgagctggatcgtttcattgctgccggttttggcccgcgccttggccaggttggtataagctgagtagccatccacttgcagaatgccgctgaatccggcgagatgacgcgccacgcaatcggcgcccctgccgtcttcaaaacggtaggccaccatcggcggactggttccgccatagggtcgatcatcgcgtgcgtaagcccacagccaggccttggtggttttcccggaaccgggggcaagggtgggcaaggtcgtctcgtcggcgaagaccctttcgccctccttgacgcgctccaggatataatcggcgagcatctgcaactcgaagcccagatgccccatccactgcgccatcagtgatcggctgacctcgacaccatcgcgcagatagatcgcctcctgccggtaaagcggaaggccgtcggcgtattttgacacggcgatataggcgagcagccgctccgtcggcaggccgctttcgatgaggtgtgccggcgccagtgcctgaaccacgccgtcgcggcctcggaaagcgtatttcgggcggcgcgtcacgatgacccggaacttcggcggcacgacgtccagccgctcggagcggtcctcgccgatcagaaccttttccagccccgcgcagtcggccgggacttccggctcgataacctcctcgatgcgttcgaggtgtgcggcaaagcccttgcgcggacgcggcgcacgcttcggcttgtccccggccgcgcggttgagttcgctctggatttccgaaaggccggtttcgacctcctcgaacgcaaaggacacctgttcgtcgttgacagccaagcgcagccgctcggaccgcgtgccatgttgcgtgcgctgcagaactttcaggatcgacgtgaggttggcgatccgctcgttggcgcttttctcgacggccttcagccgggcgacctctgccgccgcggctgcaagtcgggcctcgttcgcagctcgctccttggccattgcgaggatcatcgctttcagcgcatcgacgtcgtcgggaagatcggcaacaggcaaaaccatgggaggcaatagagcacaaaaacagccgttttcccaaccgttacagccacatgattcatcatgtcgcaggccggtttcagcccgttaacaacggccgcctgaccttggccgggcggatctttttccaatcgagcccggccagaagcgccatcaactgcgaatggtccagacgcatccgcgccgccgatatgcccggccagcagaagctttgctcttccagagttttcgaatagaggcagaccccgctgccgtcccaccaaactatccgaacacggtccgcccgcttcgatcggaacacgtaaagcgaaccattgaacggttatgtgccgcaccacataatgcagagcgtttttagcgtggcgtcgcgtgtatccacgttgacgcgcgcgccgaggcggatggcgacggtgcgctaaaaacgtgttggactaagccgcgggtgcgtttcaggtcctatgggtattgaatggtgcggctcgaaggaaaggcgtcgcaggggcggtgatgacgtacgccgccgctgggtgcacgggacgaaagcagcgccgatatggaattcgacaggggttgagattgccattgtaacctgccgggaaggatcggtaggcgcaacggcacgcaccttctcgggaccgaccggtttccggcggaacggtgcgacggtgacgatgaaagcgcttctttcatgacgtgtcccagcatcgcggcggtccggtgacgccgtcgaagatttcgatggtgatcatctgcccttgatgacaggccgggcattgtctgagggaacgcccggtgagttcctcgtagcggtcgcggtactccttcggcgcctgggtctccgatggggcgggaacggacatgccgagcaggtcgcggcattgggcaagcttttgttcgcgatagcgattgccgaggaaaccgtaatagcggatgcggtggaagccctcaggcaggacgtgtaacagaaagcggcggatgaattcgtcggtcgacacggtcatgaccttttgccggtcgccgtgccgataatccttccagcggaaacgcaccgctccatcttcgatatcgacgagccggttgttggagatggcaacgcggtgcgtataacggccgacgtaatcgagcacctgttcgggcccggcgaagggcggcttggcaaagacgacccactcggcctttcgcagcggcgccagatagcgccggaaggcgttgcgctcgttgagggctcgcaagtcggagaagaactgcagcttgccgccgtcgaaggctttctccaggtgctccagaaacaagcgtcggaacaggcgagagagcacgcggaccggcaggaagaagccgggtttgcaggcgatccattgcgtgccgtccggcgagaacccgccacccgggacgacgcagtgcagatggggatggtgcagtagattttgcccccaggtgtgcaggacggcgaagaagccgatctcggcgccgagatgtcgggggtcggcagcgatggtgcgtagcgtctcggcggtggcgcggaagagcagcccgtaaacgagcgccttgttctggtaagcgatggcggcaatggcctccggcagtgtgaagacgacgtgaaagtactgtgtttcgagcagctcggcgcgacgatcctccagccattgcgcacgggcaagcgattggcagcgggggcaatgcctgtcgcggcagctgttgaaggcgatgcgccggtggccgcattgatcgcacgcttcgacgtgcccaccgagcgcggcggtccggcacaactcgatcgccgtcatgacgcggcgctgcgcggtcgaaagcgacgtgtgctgggcacgataggcctcgccgtagcgacggaagatatccgccacttccggccccgaacgggccatcgggagctcagaaatactcaggtttggcgggcggcggcgtgggcgccggacggggcaaaagctcgaacgggcttgaggtggcgcagactttgttggtggcgatgcgcaggtagtgggcggtggtcgcgaggctgcggtgaccgagcagcaattgaatggtgcgcacgtcggcgccggcctcaaggagatggacggcgaaggcatgccgcaagctatgtggcgtcaccggtttggacaagcgggagagatcgtgcgctttcgcacaggcttgcccgactgcatcccgagtgatcgggtggccggcgcgatctccggggaagagccactcttttggccgcggcatcctccaatagtcgcgcaggatctccaggagcttgggcgacaacatcacatagcggtccttctggcctttaccctgctcgacacggacgaccattctctggctgtcgatgtccgtgggcttcagctgaaccgcttccgagatgcgcaagccagcggcatagcacgtcgtcaggatggcgtggtgtttgagatcaagcacgcagccgagaaagtgctgtacttcatccggactgaggatgatcggcagcttctgcggcttcttcggaagcggcaatacctctgcaggcacccagtccctctcgagtgtgacgctgaagaaaaagcgcaacgccgcaatggcgatatggattgagttaggcgccagcttcttctcgttggccagatagacctgataggtccgaatatcctcgcggccgagcaagtccggcgccttgccgaagtgtcgtgcaaacagcgacacctgccgcagatatgaaagctgggtattgagcgagaaattgcgcacctgcatgtcctcgctcatgcgctggcgaagtggggtcatgacgagctcctctgtctgatggaataggctgccaaacagccgtcccatcgtcgcgcagttggggctcctactgaatacatgacctccttgccgctccgcggtagcggagcgggttagtccaaatgcgattatgtgccgggcgagattatgtggcggagccgtcgcggcgccagccgaggcccgtctaatctggaattctccgccacataatagtcagatactgttcagtagttgcagcacggcgtcatttggtcggaaacggatgcccagatcgccggcgactccagccttctcgagacctttgcgcatcatctcgacatcggcggcggcatagcgatgggttgtagcgacctgtgcgtgcccgagccaggcttggatcgttaaaaggtcaacgcccgcctggagaagcttcatggccagtgagtgtcggctatgtcttgatcgatataggcgacactatctaccccgccggactatgtcgtgtaactagatttcgatcaaagatttcaatgctttatagatagcgtgtagagatagttcgtagcccttccagcaatccagcttgggaagggagcgaagaatgaagtatttcgtcaatgccgattttgcgctgtcgcggccgccagagggcccggtggcgatttacattattccttttgccgaatggctcgttgatcgaggctacggccttgtttctacaaggaaccaggtgctgatggctgccggcttcagcagttggcttcggcaaaaggggattggactcagcgacataaatggagagcatgctgggcgttatttgctcgaccgagtgcagcgcccaaagcttggagatgacgccgctcttcgacatctattggcttttcttcgaagtcaaaacgcgatcgccgaagagattgaggtcgatcacaacccgtcagcggtagaacaacatgtgcaggcatatgagcggcatctgcgagacgcccgtgccctgtcgcgtcaaacgatcataaattaccgacctgttgtccgggattttctcagcttccgcttcggtgatggcgagatctcgctcgcacaattgcgcgccgccgacgtgaccgatttcgtgcaaaagaaggtatcgcgcctcaatatgcgacgcgcaaagattgtgaccacggcactgcggtcatttctctcctatgcgcgttatcggggggacatcacgtcggacctcgcggccgcggtcccgatcgtggctaattggtcgctctcatccattcctcgtgcaatcggccgcgatgacgtgagccgattgctctccagcatcgatcgggatacgcccatcggatgtcgcgattatgcgatgatcctcgcattggcgcgactgggattgcggtcgagcgaggtggtgacgctcgagctcgacgatattgactgggtagccggacggatccgggtgcgcggtaaacacggacgtaacgaacttccgttgccggcggacgttggcgaggcgattgccgactacctgtggagggcgcgtccgcgcaatgccagtcgccgtgtttttctacgcgacaaggccccgatccgaggcttcgtgggcccgagcggactcgggtcaattgtcagacgctcactcaagaggaccggcatcgactctccaacaaagggaacgcaccaattccgacatgggcttgcctcggagatgctgcgtggcggcgcgtcgctgggtgagatcggcgaagtcctgggacaccgtcatgtgcagacaacggcaatttacgccaaggtcgatctcgacgcgttgcgaacactggctttgccatggccgggagaagcccaatgagcacattccgacaggctgttcaggagtacatcgagatgcggcgagggctggggttcaagctgcgagagacagaacggggattgatcgatttcgccgccttcctggaggccaacgacacgccacacatcacgacggaactggcccttgcctgggctcagcgaccgtcgcgggcgcagccttcgcattgggcgacacggctgggctatgtccgcgtattcgcccgttatcgggccgccgccgatccgcgaactcagattcctccaagcggcttgcttccctttcgcccgaagcgggctcgaccatatctctattcgaaggaagacatccaacgcctcctgtcggccgctctggagatgccgtgtcgatatacccgctgcaagctcaggccatggacatattattgcctgttcgggctgctgagcgtttccggcttgcggctcggcgaggcgcgcaacctcaagctcgcggacgttgatttcgacgctgcggtgttgacgatccgcggaacgaagttcggaaagtcccgtcttgtaccgatgcacgcatcgacatgcgcagtgctccgcgattatctcaaacgccgacgacagcattgtgcagcccaggcggcatctccctatttattcacttcgcaactgggcaatcgccttgatgtcggagacattcaccgaacattctatgctctgtctcgccaaatcggcctgcgcggcgcaactgacagccacggtccgcggctgcatgacatgcggcatgtgttcgccacgaacacgctggtgcgctggtacgaagccgagcaagatcccgagcggctcctgcccattctgtccacctatctcggtcatgtccacgtggccgatacccaatggtacctcaccggttcacccgagctgatgaaagaagcaatgcgccgccttgaacgtcgctgggaggatcggacatgaccaagcacgccagcctcgcgccactcttggagagctttttcctccaacgcctgatgcaacagcggcaggcaagcccccatacgatcagttcctatcgcgatacatttcggcaactgctgaagttcgcagaacgaagattgcgcaagccgccctctcgcctgaacttcgaggagatcgacgcgccgctgatcgttgccttccttgatgacctggagaaccgccagggtatcagcgtccgcagccgcaacctgcgcctcacggcgattcattccttctttcgctatgcggccttcgagatacccgagcattccgcccaaatccaacgcgtgcttgcgattcccagcaagcgcttcacccgaaccctcgttaatttcctgacccgtccggaggtcgatgccttgctggccgcaccggatcgatcgacctggtccggccgccgcgaccacgcgttcctcctggtcgcggtgcagaccggattgcgcctatcggagatcaccggtctcaagcgggatgatctgttcttcggcacgggggcccacctgcgcgtcattggtaaagggcgcaaggaacgctgcaccccgttcgccaagtctacgaccgccgtcttgagaaactggctgaaagagccgcagcgcggagaccaaggtatcctgtttcccagcgccagaggtgagcggctgagcgttcatggcgttcagtatatgctgaacaaacaccgtcagatcgcttctgccatgagcccgtcgctggagggaaagcgcgtcactgttcatcgtctgaggcacacgatggccatggacctcctacaggccggcgtcgatcgcgccgtcatcgccctgtggctcggccatgaatcggtcgagacgacacaaatctatctcgaggcgacgttggcgatgaaggaggcggcgttggcaaagacatccccatattccgggaagtcatcccgattccggcccgacgacaatctgctggcgttcttgaacagcctgtagatcccgctgactatgtcgtgtggctcggccgatcctgtaggaaatctcgttgttcctcagacgcttgcgttttcggtacccgacatagtcgggtggggtagatagtgtcggaagatgtgcggcgatataggcttttgggccaaggtcggcctgatggtcacggcctgggccaccgcacgccgcacgatgtgggttgctccgaagcgcgtcaggcgctcgttgcgggcgccgacgaatatcggtcgcggctcgtggttcgcgattccgtgctcggccaacaaggctgtcagtgctctcgccagatcctgaggaatggggatgacgcggtctctgcgccctttgccgcgcagcagcacttgcgggtgcgaccgttccaactgaaggtcgtttgcgttgacgccggtagcttcggagacccgcgcgccggtccgtgccaggaacagtaaaaacgtgcggtcacgccgaccacggggcgtccttggattgggcgcctcaatgagggcgtccacttcggccttggtgaggtgatgcgtcacctcgatgtgcgcccgttttatgggaatcgtcagcacgcgttgggcgacaccgaaggacgccggatcggcggccgcgacatggtggaagaacgatcggatcgccgctaggcgggcgttgcgcgtggcgatcgtgttgttccgcttctcctcgagttcgtcgagaaacgcgagaatgaggtctcgatcgagctcctcgagcaccagagccgccggcttcttccgcaaccgggtggcggcaaagaggatgagcatgcgcaaggcgtcgcgatagctggccatggtcgcgggagtcgcgttgcgttgtttggtcaagcgccggcgaaagtaggactccaggagcggcgccaggagtaagtgttcgctcatgctgcgcctccatcgaggaaggcgcgctccgccgccatggcgagaagatccaccgagccagtgaggtagtaggctgtgtcactgtaattggcgtggccgagataggtggcgagcaccgggagtagcgcctggacgttggcgcgttgttgatgccaaaggctcatgcgggtcacggcaaaccggtgccgcagatcgtgcggccgcaacgtcttgccgtcatcaaggccggcgaacttgcggacctgagcaaatccgcattgcaagccagtcgccgagaggcggttgccacgagagctgaggaagaaggcctggtccttgggactgggaaaagcggcatcgcgctcacgggcatagcgacaaagcgctgtttgggtcgtcgcgtgaaccggaacgagacgatccttgcggaacttcgtcttccgaaccagaagaaccccgttggtcagatcgacatcggaacgatcaagcctgaccacttcgcccgaccgcagtcccgagcttgctaacagtccgatcagcgtcgccatcgtcagccccctgagagggatgcctggcgaaatgcgggcgcatgcgtcgatgagcgacgccaactctgcctcgctgaggatacgtggaggcggaatcgccctggatctaggaaaggctctgcgcttcagggcttcggtttgggcgtcatagacagcgagatactcgtagaatcggcggagcacgccgtgacgagtggcgcggctgttggcggcgccgccgaacgacaggacgaagtccagcgccatagtccgggtggcgggcgcatcgaattgagcgcgttcaacgtagcggacgaaagcccgcaacgtgccggcttgtttgctgaaggcatagccgagcgagtgacgcaggtcgatgtaacgctcgaccttctcgccgaggaatcgggcaaaggcggtcatgcagcgcctcccggaaaggggagtgcgacctcggcgagttgcgaggccgcaacctttacgtacagcgccgttgtgttgatgctccggtgaccaagaagatcggcgacctcgttgattggccttcgctgcccgacaagctgggtggcgaggctgtggcgcaggagatgtgcacctgcgacccgcccgagttcgaccccgccatgtcgcaatcgcttcctcacgatccttgatacaggcgccgcagacttgaacgctcccaccggcggcgtgaacgacaggaacagatacggactgtccaccttcggtcgagcgcgcaggatgtagtcgacgagtgcggcgccggtctcctcaaggagtggcaccacccgatcacgcttgcccttggtgcgccggataaaaacctcgccagtacgccagtcgatatcctgcagccgaatggcgcgtaactcgccgttgcgaatgcccgtggtggcgagcagcagcaggacggctcgatcgcggatagcgaccggcgtcgttgcgccgatcgcatcgattgcgcgccgaacgtcaccccatgcaaggcgcggcggcagatgcgccaaacgccaatagggcgtcctcgggacgatgcgggcaagatcttggcgatggtggccagcccaacataagaaccgaagaaatgttcgaatgtgagaggtcgctgccgtgcgggtgccggaggtcgccgatagcgacagccgatgctcgacagcagcgagcacgtgctcggccgtcaacgcctcaagattttggccggggtggcgatggcggaaccaatccaaaaagcggcggccgcccagaagaataccttcgcgggtcttcggctccaggccccgtaccgtgcgcagatagtccgaaaaggaggccagaagcagagcatccgggtcagcctcttcacttggaacgggaataatgaaccgctccggagccactcgccgtgcgtgtgccagagccgatacggccccgatccgcggagtatctgtagtaaacgtgcccaaatagctgtcgatgacatcttgatggattggcatcaagccacagcgcgtcgcggcaaactggctaaaacgcgcaacccggctcaggtaaatcttggcggacgctcgcttataaccgagcgtaagaaaatgctcggcgaggcgatccatctcgccaccgagcgcaccgctacgtaggcgcttgagcaccccacgatacgagaaatagaactcgagcatgttgtccctccggaatagcggcgcggggggatcccgcactcatccaagaggcacgaaatattatgtggcggagaattccagattaggcgggcctcggctggcgctgggacggctccgccacataatctcgcccggcacataagaacgggtcgaggccgccgtccctcaccagcgccatcaaagacgcggctcccttgcggaagtcgaccggctggcacgacacgtaaaccacaactccggaagcgatcatacctagcggaccacccggagaatcttggccaggtgatcgggatcgacatcggcgccggcgcgcaccacgatatcgcccacgacgatttccaccatcgaactgcccaccgcttcaaagcgcgtgaacttgactggcgcgggcgctccctccgtcaatggcgcgaccattcccgacgagagcgccttacgacgccaggcatagagctgcgacgggtccaatccctgagaccgcgcaatcgccgacacattggcccccggcgagagcgcttcggcgacaagctgcgccttctcctcgtccgaccaatgacgcggcttgcgtcgagaccgcaccggctccgccgtcaggacctcgaatgttcgatgatgatgatgattcacactgtcgctcataggtttctccgcatgactcatgcagagaatgaccgttcagcggccctaaagatacgtggggtgacctacccgcttacgagaaatcgaatgtctgccttatctagtcacgcgttaagccggccagatggggtctgctggtcggtttcgaatcactgaagcgtcgacagcctcagctttctcgtccggatccgatggatagtctatggaaagctcacaactggttagtccggaaagtacagcggagtatattgttcctgatcatgaaggtccgagaatggtgaaatagaccaatcgattgattcaactgcgcgttgaattatcgtatcagcgctggagcgcgagggcgctacagcaacgacatatccaattcggtcacagtaatcaccatttctgactattggcgttcctggtctaacatacaatttgacgtccgcgacaccgggtatagctgccgcccggtcgataccatcaatgtaatcaagtgtgccatcgcgatccgcaatcaaggatcgggcggtcgctgttcgtgactgcctcttcgacaaattgcattgttcaccaatagcaagcttgatgtgctcgccgatgagatcgacgtcgaaggccagctgaaccaattgcggatcaggattaccagcaagtcgcgggttgacttcaataacgactggaccgacctcggtccaccggaactcaatgttcgttggtccccagccaaggccgagtgcccggaggcagcgttgtacaacatcaacggcacgctcgtactgctcatcggtcaagggtgcaggaaaggtcaactggcggaacacgaaatgcggcggtgggccatactcagtgatgcctattccaataacttcgtctcccatgatctcggcgatgtaatgagggccatccacgaactgctctaccaatacctcgggtgaagatcgccacatgtgcttcccgcccaatagataatctgtgtgttcagctagctcgcgagcgtcgcgacacaagcggactcctcggctaccgctgccgactgcaggcttaagtactgctggcaggccgatctccgctgcaacgcattgtacttcggcggctgtggtcgccgaccgatagccaggcacgggaactccggctgccgcaaggacctgacgttgggcggccttattgcagcattgttcaattgattccggatcaggtccaggtagattgaaattccgacagatcttgccaactgtcgcatagaacgactctgcggcagatgtaactccggctatgtcgaaactcttacccagccgagaatattcgccgatcagagcatccaaattggttgtatcgacgcgagcgacttcaatgcgttccgccgcgacatagtcgtaaagtgctggatctgccgccaggattattggatgtagccgaagacgccggacggcttctacgtacgaccggccattagtccgcgtattttcaattaaaatgagcgcttttcgcattttatctgcctctgctgttacgttctgtgggtggcccaggcgatctgcatcagttgtttcagccgctgaggacggtgcccactcccggctgtaattgcgcatgcacaatcggcgaacgcgtacatcataaagagccagagtgaaggagcgtgctgtcccgaacatgattttcccactcacgggcgacttctgacgtattcgagagcatcttgagaagctcgtcgcgagtcgtccagaggagccattcgtcgtcgtctattcctaatgttggcaaccgaaggactgatccatggggctctcgatgacagtgtcctgatcgatcgaatattctctttttgatgtaccattcggccacaagtgagtagatgaaatcaggggaccagttcacccaagcaagcgcgaatgcaaggcgaccaagcggtgctagcaaaccacgacccctaaagtcgtcgcgaaaccacatgtcaccgcgataagcgactcgcccggtaatgctgcgagcgctgggtgcgtaacaacgacacgttgagttaaggcctgatttgccgacggggtccgcaaagcaggcgcgcagcgactccagatgctcaacaagtgtggttttggatagatcgtatagtcgcaatgcctgtacatgggcgactctgtcttcttggtcacgccctacaatccagaaggagctctcaggtgaaagatcagagtagttcggattgaagttcggagtagttggatatttgcctggaagtttgctggtgatcgccacgtactgccgaaaatcgtcgcccattgcaatattgaggcctgcgttgcgggctacatcatctgcgcaggaaatgtactttgaaacgtcaagtgtggtcacgttgctttgcatgttggtacaccccgttttattgcatcggacggctctatttctaaagctctggccaacgctcggatactgcggcattaggtgggttgacgggcggggcggctcgcggcctcgaaagggagttagtaccatttaccccggaccgccctagcgtttctgaatgccattaggaagctcgcaacggcggagcaagtgttggcacgagaacttgttcgatataggcgccgaacgctatgtcatgcggatcgaggaattgacccctcctattgcctcacccaggaatgttactgaagttgagggcactgagatacgggcgcgcactccaaccagtcgccattgcgtatgatctgcccggctatttcaatccgccaagccttgacggccttttgtaccgtccgcaggcttttctccgtgaagcgtgacggatcggcgctctttagacgctgcaggaccgaggctgccgagagcgccggatccgcctctagccacgctcgaatttgggttcgaatggctccagcaggctcggctttttgggtaaggcttagtccgtcgatatggccgccgacgtgtcggccgtttctctccccgcctgccaggccgtcttcaggctcgaggtgaatcgctggagatcgatggcgaccggttcttcgggcccgcattcgagccacggcgatcgacccgctttccgagctcctcctgggcagcacggatgcccgcaaacaacgtcaccggattttccctttccagcatgccgtcgtcttttggctttcacgatcgggcgatccgtcggccgggtagctccgtccttccaggccgttcgcaaactcgcgaggaaaaggtcgatcggctgagctatcccgtcagtgcgcatggccggcggcgtgtcggcaagcgcagcgagtcgctcctgcagggcgcgaatatcgcgcaatagcaggactggatcgagcccggcgtagatttcctgcagacggagcgagctgcatcttacgcgcgagcgtcggcaatcaggcgctgatgcggcgtggctgggcggactatacgtcttgcgcacacgagcaccgtcgcgctgcttcgccattaatttgaacgatggctgaaagaagttcacgaacagccgcgctgatcggtagagcttcgctagcagcgtggcggcctccagtccctggaaccgacggtatccgaccatcctgcgcaccacggcgccattcttctgctcgacaaaggcccggtcgttcttgcggtaggggcggcagcgcgtgaagacgatgttggcggcgtcacaatagccttcagcgtctcgttcatgaagacggtgtcgttgtccgtatccaggccgagaagcgcgaagggcagttgcttgcgcaattctgtgagcacactcctcaacagtgtctgttcgcaacccagcagcggcgcacattccgtccagccagtcgcgatgtcgtgagaacaagggtttggatgaagctgccgcgagccctagggccgcaatgggcgacgagatccgcctcgacaaaacctggcgccgtcattccagcgcgccgacgccggccaccgcgggccaccacacttcggcatccggcagactacgatcgaatctcatcgccccttcactccaagcacaaacgccatctcttggatggcgcaacggcgctgagctatgcctgctacttccgctggccgctcatcggatcgcgcttcaacgtctcctgcaccatcagcgacaggccgggaaagcccatgcgcatatccgtatagccggtcgcgagcgagaccttcacaccgatcgggaccgggatcatcgccgctccagcacatcaagaatccgaccgagggcatcagtgtcgatgtcattctggacccccaggcgacgcccaccgcccggctcgatcgtcaccatgcttgccttcttgcgcgagcgaggggccggcggcggctccggtgataccggcctcggcggcactggcgatgaatgtcgccaggagacgtggtctcaagagagcggttgtcgcgcttggccgccggctggaaacgatcatgcatcgcatgtggagtgacgaaacggagtttttgctggagcagaaaagaaggtcttggcccggctcaacgctgctgattgaaggctccgcgccgagcatggggtctcgagaccgaacggtggaggtgaagatattccgcctccggcggtatggatgtccttcgcaggacgatggatgaggtgagttcgttgcaagcgctgtcccggtcgcatcagttgcggtcagggcgtctcctaaatttagtctagtgcccgtccataaacgcctgtttttgtggaattttcaaaggtttcttgccggctgacgcgtgtttcttggacgcgtgatggcgcaatgccatgcagattatcacccgaagagcgatctggcggcaatgggtcatggggtatccgccgacgctcgccggggtttgctctgaacagtgccagacaaggggagtcaggtgtgccggaggcgggcgaagagggagagattgtaagcgaccgccgaggaccagacataagccttgaagtggtcgaggccgcgccaggtgcagcgccccaagccataagcgcgtttcaggcaagagatgccggcgtcgatgccggcgcggaagtttctgagcttgcgatagacccagcgactcctgaccatgtcttcgatcttgagaccgcgcttcttgtggaaggccatgtcgcgtatgccgcgggctttggctccgctcagattttcgcggctggcatagccgccgtcggccgccgcctgacgcggcggctcgccgtaaaaagcgatgtggcgttccagcatcggcagcaagcgctcgctgtcggccgggttgcccgcttcgatgacaaggtcgaggatcagtccgcttgtgccggtggtcagattgagtttgtggccgtagtcgacgtcgcggctgcccttgacgatgatgtcgacatgcggctcgaacaggctcgccagcttctcgccagccggcaccgcctcgccggccaggacccgccgctccgtctgggcaatgatccgctcgaccagcggcttgtagcggcagacttgcgcctgccagagttcgaccgccgggcccgccgtgaggagcaactgtccactcgcctgctgcagatagctcaaggtggtgcgcgcgatcttgagcagttcgcggtagtgcttcacccgtttcgggcgaccgcgggtatattcgatcgctcgagcccgcttcttcgccgcgcggcagtgatcgtgccatgggatggcgcgacccagtgcatcagcctgctgcaacagtcgcaccatcacccggacagcgtcccataacaggctgctgtcgctcggctcatggatcggtgcggcggtgacggtgctgtccacacgcacgaccttgccgctttccagtttctcctgccgggcgctcgccagcagcacccggttgatctcttcaaaggtttgcgcccggatcgggctgattgtcttgtgcaagaccgacttcttcgggttccacccccacggcaaccgggcaaaggcccggaaagaggcggagtcttcgaaatggaaggccagttcctgatagatcctatgaggagaggtggatagcgatccgcgctgtgacaaagtgatgtcgctttcaatcaacaccttactctggagaggccgaacatgctcgctgcgaatgaacgacctgaagcgccgaccgctatccgcattgatcttggcgcaatcttcgtctccttggaactcagccgttcgaaatggctaatcacctcgctgtcgccgggcggcggcgagaagatgtcgaaacatgcggtggcggccgacgacatcgccggcctgctggcgcggtttgccgagctcaagaggaaggcgcgggcccggaccgggcgctactttcccaccatcgtgatccaggaggccgggctcgacggcttctggatccaccgggtgctgcaggccgaggggatcgaaagccacgtcgtcgatccggccccgattccgacctcgcgccggcggcggcgggccaagaccgacaagatcgacggtgagacgctggtgcgcgcgctgctcgcctataaaaggggcgagccgcgcgtctgtgcgatgctgcgggtgccgacgcccgaggaggaggaccgtcgccgcatctcgcgtgagcgcaaggcgttgacgaacgagcgcgtacgccacgtcaatcgcatcaagggcctgctgttcagccagggcgtctccggctaccagccgctgcgccgcgaccggcgcacgcggctcgaggagctgaggaccggcgacggccgaccattgccgacgcatcttaaggcgcaggtcggccgcgaactcgatcggctggagctgctgatcggacagatcaaggcagtcgaggtcgagcgcgacgccatgctcgctgccgcgccggtcggctctgcgcatttcgctgattgtgagcagccggcaccggcgatgctgctcgccttgaaaggcatcgggccggagtttgccgctgtcttgtggtcggaggggctgtcgcgtcattttgacaaccgacgacaggttgccgcctatgccggccttgcgccgacaccctggcagagcggctcggtcgatcacgaccagggggtatcgaaagccggcaatccaaggctgcgaacgacgctgatccagggggcctggctgtggttgcgccatcagccgcactcagcgctcagcctgtggttcaagcagcgggggaagcagaacgatggtcgtctgaagaagaagaagacgatcgtggcgctcgcctgcaagctactcgtcgcgctgtggaaatacgtcaatgccggcgtcgtcatcgagggggccgtgatgaagaccccctgatcccgatcgcaaccgaaattctgcaatcttccaggacccgatcagtcctggcggatctaggtgggacgaaccgcagttgagtatggcttcaaacgccgcttgatagaatggtctcgtcctcctgagcccttgtccgccgcaagcgggatgttggttccgctgtctcgaacagcgaccgtatataagttggatctggcttggcaacgagccgcgtcttgcaatcgggctcagaccgtggatgccgcaacaaccgatggaaagcaaaaaaagtcaccctgacgacagttccacattgacgctcctcatataaactcaactggcgatgctgcttgagcagcgcgcagcgcagcacagcctcggccggcagcccctcgcggccggtctccttgaggccatgccggcgcaggtcccgcgtcaccagcccgagcagatcgcgatgctcatccagccattgcgacatcaccttcagttcacgaccgatctcgtgttcggcgaaaagatcgaatatgctcgccttgtcaagcgaatcgaagaattgaccccccctattgcctcacccaggaatgttactgaagttgggggcattgagatacgggcgcgcgcttcatccagtcgccatcgagtatgatctgcccggctatttccatgcgccaagccttgacggccatttgcaccgtccgcagcgctttcttggtgaagcgtgacggatcggcgctcacaaggcgctggagcaccgcggctgccgagagcgccggatctgcctcaagccacgctcgaatctggggctcgaatggctccagcatgctcggccttttcgggtaaggcttggtccgccgatagggccgccgatgtgtcggccgtttctctccggcctgccaggctgtcttcaggctcacggtgaatcgctgcagatcgatggcgagcggttcttcggtcccggcattcaagccacggcaatcgacccgctttccgagctcctcctgggcggcacgaattccggcaaacagcatcaccggatcttccctttccaacatcgcctgcagccgctccttatcggcctcggccacaccggaatgggcaaccaccccgcgcgataggcggcacgggcggatggtagcgtttgacgacgcgggcgccgatccgtgtcttctctcgcagcttgaacgaaggctggaacagattgccgtagagacgcaccacgtcgtagagacgcccaagggcagccgtcgcctccgcgccgacgagccttccgtaaccgaccagccgtcgcacgatcgcgccgttcttctgctcgacccaagcctgatcgttctttcgatacgcgcgcgaacgggtcacctccaatccctgacttcggcaccagcagaccacacgttcgttcatgaaggcgctatcgttgtcgaagtccacgccctgcagcgggaatggaaacagcgagcgggcctgattgagggcagcgataacgagaccgctttcgcgcgtgcggactggcacgcactcggtccagcccgtagcgatatcggttagcaccatcgtctgcacgaaactaccggacgaagaggtccccgaatgagccacgaagtcgacctcgacataaccgggcagcggatcgttccagtccccgaaagtgcgcaccgggaccgagcggcgaacagcagaactcattccagcgcgccgacgctggccaccacgagccaccacacgtatctctgacagcaaccggtccatcgtcgccgcactgacggtcagtagcttatcgcgaagctcggtactcagatcgagccggccgtgacgctcaagagctggcagcaaaatcgggatcagcggcttcagacgtttcgagcagaggcgatcggatgcttcccacagagccaccagcgcttcccgaacctcgggaccatacctgacagcatattgccgagcgcaaggcggctcgctctcactagggcggagcactcggatcgcatgcttgcggtgatatccggtaactgcgacgaactcatctaggatcctttgcttgtccgcccgacagctcgatcgatatcgttcgatgatcgcctcgaccagttccgtccgtgtcgccatgctgatccgccgtgccatccatcccccgagccggaacagcgaaccatggccatcccatcgggagcatcaacactatcggtaacattttgcttgaggcaatgcggggtcaatttttcatttcgcccgacacgcctggacggtgcgttcttggcgcattgtcggctccggcggttacgggtttatctttagaatcagtagcttgatctaaagtatacctgaagccgccgggctttgcccgccgagatatcgtgattaatacaataatttcagcagtttaacgtttatggacgggcactagtctagattagaccgctgcattcttccgaccccatggtgggagggccagggtgccgatccccgaaaagaaaaaagaacccgcggagaccatttcaacgctagccggaacgtaaagctcaaaagcgcttgaccacaaccgccgaatagagaagtgctcgcaccaggagttgcagccttcaggtcatccggccttcaccgtgggataccgtcagcctcgcgcaagcgacgatgtgctgagccagtgcgcatgcgtttgtcaccactgcccatttatagcgctgaggtttgcgacatcccgcaacggtacgttaggccaccggcgttgcatcgggagggatggagagggttgcaatcgccgcaagcacagatgtgatgcccgccaaaacgaatatagccgacaacgattctgtgatcactaccccagcaatggccgctcctagtgggaagcccgcttggtttacgcttatcgaaatggacatcactcgaccaagctgtcggggattggtgcgccgttggcgcaaggtcagcatcgcgacatcaataggaccggacattgcgccagcgagcaacaggccgatcgtcaggccacggaagccgaattccgctgcaatgggccacgtggcaaaagcggttacggccattccggcggtcataatgtggcgctcgcgcccagtggtgcacagatgtccagcgaggagcgcaccaacacctccggcgataccgaccagagcccataaaagccctactactgtactgcccgccgcaacagtgtagttaccggcaacgaacaccggaatgaccacgtgaagggcgccccatgtcatttgatacagcgactgggagacggccagaccgcgtaatgtgggctgtcggaccaccacataaatgcctttgatcgcttggcgtagcaaagatgtgcgtgaggatgccagccctggcaggcgctggacctgggataagcagaccgcggcacctgcacaggccgcagcgattagagacatcgcagcttctggcccgagccatccgacgagtccgcccgccatcgccggccccaccacatcgacgatggaatagaccgcagtgtctagcgcattcgcctgatcaagcgcgtgtggtggaacgagtcggggcaacagcgtgcggattccagcaatgcctaaggggccggctagcgaaaatagcatcgccagggtgcatacgactggaggactggaccaaccaagccaaccggcaaggctaatcgcggtaatgaaggcagtgctagcgatcatgtcgatccttactgcgattgtcggtcctacgcaatcaagcaaaacacctgcgagcggacttacaatcaggcccgggacaattgctgcaaatgtaagccacccagccagaactggtgacgaaaaacgcgccagcgcgaacagcaccaatgtgaggacgaacatgcgtccggccaggcgggacaaggttgcagcaagaagcaaggagaataggccaggtatcttcgaaaggcttctgtatgaaatttgtcgttccatggtgacctgcacacgggcgctatgttggttgcagtttacgagacatccggacgtgttactggggggccgggtcctttcgagcacacgacaagtccaagagcagcgtatccgtagccgccgacaccttcccgcatcagacaatcggcactgcttttggccgtgtcgccagtctaacaagtcgagtgtctgattctgtttatagactcgctccgacggcgtgccgcatgattaaggctgaaaatgaaaacctcctccagcgatccaggcggagcacccgctcgcctccttcctaagatataggcattgatggaaatcgaagaatagcccaacacgatactaccaacgtaaataggtgcacgagatggcgctctatgctgagactctccacgaagctcagtgcgattatgcctttgttcacgttagtggcggtgccgaccacatgcttatcttctcggtcagcatgatcaaagtttgcacgtgatctggtaatgttagcccccgcaatgcgagttgaagaatgcccaacgtccagagtttagcgattattgtcactgacccgcgactgataatctcgacttggaaagatcgctgtccagcgccgctgagctcggtcggcggcatgccaattcttgcccgcttggtctctcaattggcacaggcgggggtacaaaaaacgatcgtgttcgcattagatggtatcggcgacgttaaacgtattctcaacaaccgcatgaagcgcatggagctcgtgatacgtatcatgccgaccccgggctctggtcgccttatagatctagcaactattacggaaatcgctgagttccacggtcaagttttagtgttcactgagaacgctgtcatcgatccctcactgattcaacgtttattgcgatcatctgaccgcaatatcacggtagtaagcagatcagaacgcagacgatgcttgcgtttattgggcgatattggaggccgtcttactgccatgttgcccggtgactctcccattcgagaaagtgcttctgcagacgttagccccgtcgggatctataaatttgatcccgcacttctccgagcgattgctcgtatccgcccccatcggtttaatgacgatctggagttcttcgaaaccgctttagggcttcaacgccatcaaatttacttgatgtatgccgaccctcaacacgtaaggagagtgaatgatgccaccgatcttgaggcggcaaattttgcgtctagttccagcggcgaccagtttagtatacttgaacgattgcaagcggggaactggcgatatccagccagtgagcacatcttgctctgtaatcatcattttcctccagcctcagtagtcgaccgactgcgcgaacgtttgcaggacctgctctatcttcagccctccgaccagctcgatattatagcaaagctctcggaaatgacagatcttccggctcgaaatcttgcagttggtaacggcgtgggcgagttaattaaagccctctacggctacctcgatccgagaatcgtgattccaaccccaacatccgcgcagtacattgatgccgtcgaaccaaataaagtgagtcgtttcgagcttccgcctgagaactttgacttagacgtggaggctttcgcaaattttgcaaaaaggcggcaagcgtccgtcgctgtactggtcaacccaaacaacccaacaggacgcttggttcccgtccaggagatagaatggttggcgtcacaactcgctatagagaagtgccggctcgtggtcgatgagacgttcatagagttttcagtggcagggaaaggaaattcggtagagaagcttctcagcgtttttccaaagatggtcattcttaaaagcctaggtgcgataatgggcctgggaggtgcccagatcggctatcttgcttcgaaagacgaacaactcacccacggagttcgccggcggcttccgcttgggaacataaatggcatcgcagaatatctcctttggattttgccagaatttcgcgaggagtgggaagcaagctttcgtcgcactcgagcagacgttgtgtccttctctcgaatgttggatactatcccggagcttgaggtccacccttcccaagcaaactacctcttctgcagaactcctgaggcttggccaagtgcgaagcatgttgccacgatgcttgcgaagcgatacggcgtgttggtccagaactgtgaaaatcagtgtatgaagtatggtgaccgatacctgcgcttgactgtgctaccctatgaggagaatcgttaccttgtgtcggcactccggcggattaatgaagaactggtagaatggtcgacacaaagtaagcgcgcgggtacggcgtatcatttggggtgctgatcttgaattttctgcatgagtcatgcggagaatcctatgagcgacagtgtcagtcagccgcgaacattcgagcttttgacggcggcgccggtgcgggcgcgacgcaagccgcgggaccggccggacgaggagaaggaccgcctgattgccgagacgttgacctgccccctggaatgtcccgggttcgaggttggtctgttctccgaagatggagacagagaacgcagcgatcccgtttcgacgagcagatcatcggcattttgcaggagcaccaggctggtttgtcggccgtcgagctgtgccgcaaatacggtgtcaccgacgcgaccttctacaagtggcacacagagtatggcggcatgtaggtctccgaggcgaagcgtctgaaggcgctcgaagaggagaatgccaagctgaagaagctgctggccgagcagatgctggatgccgccgcactccgcgagcttcttgcaaaaaatgtatggtccgcctcgtccgtgcaagggtacgcgacatcgtgaatgacaattccagttgcataaatgtatccgggcctctcgcgagtgggctgcggttgcagccaggccatgagatccgcacatgccgttcccaataaatggttcgggcacgaagcccgcttttttgaacaggacttataccaacgagcggtgatcatgaccgatgcgcccattcgcggagtccgatggacatgatcttccacggctggtcgacgagcttgttccatgcggcgcagcaatgggtgacgatgtcgtcgtagtccttgaagatacggttggagagccagttgtcgcgcatgaactgccagacgttttcgactgggttgagttccggtgagcgcggcggcaggaacatcaaggtgatgttgtccggcaccttcagtttcggcgtcacgtgccatccggcctgatcgaggatgagcaccgcatgggcgccgtcatcgacgctccggccgatctcggcgaggtgctcctgcatggcctcggtatcgcaatagggcaggaccaggcccgcgccctttcccttccgcgggcagacggccccgaagatgtaggcccacatatgtggacggctcccgcttgcaagtgttttctgcagatatttttgaccggatcgcttgcttccatatgtgcggccttttggtgtggtcgcacatgaccactggccaagatgatttccgcaacgcgtattcctaacatggtctcgacctttagcggtcagtgggcctaacggagtttcacgcgtcttggatcgtccgatcgcatcatctgctcttcgcttgcaagttcacagcatcagctcacacggtagcattttgtctttgctcaccgtggtggctgaacttttatgatgtctgcgcttggccttctgcctggcgatatgactcgccgctcgtcataagcttccacgcaatccgcgccagcttgttggcgagcgctacggcaaccaactttggccttttccgctgcagcagccccataagccatgcagaggcgtgcctgctgcggcctgttctgacttgctgtagaagagatgtcgcgccaaccaccaagatgctccgcaacatttcgtcgccagcccgggtaatgacaccaagcctgacctttccggcagttgaatggtccttcggcgtcagaccgatccatgctgcaaagtcgcggcccgatttaaacattcgaggatccggtgtcttcatcaagagaagggaggcgcctatcgggccgacacccgggatctcggccaggcgtttgctgcattcatcagcacgatgcaacttcatcaacttttcatcgagcgttttgatctggcaagctagctcgcggtattcctgtccatgcagcgcgaagagatcctgcgccagttccggtagggacgggtcagcggcaatgcgctccaatagcgcttcgatgcggcacatgcctttggccgcaacgatgccaaattccatggcaaaaccgcgaatggcattggcgagctgtgtccgattgcggatgagtctctctcgcataccgaccagcattaacgccgcctgctgatcagccgttttcattggcacgaagcgcatggtcgggcggctcattgcctcacacaatgcttccgcatccgcggcatcgttcttgccccgtttcacatacggcttggccagttgcggtgctatcaactttacttcatggccgaacgaacttaacagccgtgcccagtgatgtgacccaccgcacgcttcaagtgcgataatggtcggcggtgttttctcgaagaacttcaccatttcccggcgcgacagcttcttacgaaggattggctgctcaaccgcattcacaccatgcaattggaagacgctctttgacgtatccataccaattcggataatctgttccacggacggtttccctcgattgagaacttcaacgaactcattctggcacattcgatgccgttgggagccgtccacctcaacatggtgcgctgatccaagggcgcggatggtctggtgccacgacgcgcccatcggcgcgtgatcttgttcttctggcctatgcgcgcttcgtcggcccaccagagttcgatgtccgtgccttgcgggagccggcttcggatttccgccagagcggcggggaagtctttttaaaagcgtctacttccagctcgttctgagcgtagtggcgtgggcgagccgacagcttggcaaagccgagcgccttcaactcgcggccgaccgtcgtctcgtccatcgagatgcggaattcctggaatatccactgaaccaggtccttgcgccgccaacggacaacaccgtggatcgccgggatcgggccgctctcgacgacctttgcaagagcctggcgctgagcggcattcaacttcgctcggccgccaggcgctttgccattcaccagtccatcggggccgcgcgcgttgaaacgcaggacccaatcccgcacaatctgcagcgtcacgctgccgatccgtgccgcatccgagcgcgggccgccgtcatagatcgcggcaagagccagcaaccgccgggcctgattggcatccttcgtctgccgtgcgagctgtcgaagagcagctccgtcgaaatcatcacgcaacaaaaccgccgaacccatcgcaaacctcctgtttgcagcatggattcagattcgcgacaccttgggaatcccatgagagtcagaaacggcgctcgttggtattacggcatgttgatccactgtttcgtcatcactattcccgagccttgcaatcgagcttggatcgccaggtgaaggcagggtctctgcgttcgtagagcgctccaggcttgatcaggacgacccagacaatccgggccatcttagcggcaagtgcgacgacgactttgtagggtgcatccgagtttgaaggccatccagccagttccccaatcgatctcttgttcggtcgagatgccgaaagcatgatcgtgcgccatgtacgagcagtttgcgcacgtagcggtttcctcgtttgctgatgccgagaagcttctgctttccgccggtcgagtattcgcgcggcaaaggcccagccacgcagctagatcgcgggctttttggacttgccgaccgttgccaatggccgcgaggagtgcagtcgcacccaaagctccgatcccggggatcgtcatgagccgtcgagccacatcctcgcgactggcgatcgcctcgatctcgtatagcgcggcgatcaggatgagacggcggcgacaatctggatgagactcttatgtcgcggtcggcatgaaggtatcatgttgattgtcgctggcaagggtctcatcgtgttctgattgtcgctccgcgacaatcagggaagcacttttggttgtcgcgaaggcggcgggtctgccgcggtggcgtttggcttccatggcggaacgtcgccgatagctttcgacgttcatttcgaagatcgttgcgtgatgaacaagtcggtccaccgcggcaagcgtcatggccgggtccggaaagacgcggttccattctccgaagggctgattggcggttatcatgatggaacgccgctcatatcttgcggagatgagttcgaacagcacgctggtttcggcctggtccttggtgacgtaggccagatcgtcgaggatgagcagatcgaacttgtcgagctttgcgatggcggattcgagctggagttcacgccgtgcgacctgaagcttctggacgaggtcggtcgtgcgcgtgaacagcacccgccaaccattctcgatcagcgcgaggccgatggcggcggcgagatggctctttccgccgcccggcggaccgaacaggaggatattggcacctttggcgagccaactgtcgccggcggcaatggccatgacctgggccttggagaccatgggcacggcgtcgaaagcgaagctctcgagcgtctttccgggcggcagatgcgcctcggcgaggtgacgttcgatcctgcgatgcgcccgttcagccagttcatgctcggcgatggccgaaaggaaacgagccgcaggccacccttcacgatcggcctgttcggcaaattgcggccacagcgttttgatcgtcggcagcctcaggtcattgagcatgatgccgaggcgggcttcgtcgatggtgttgtggacgtttttcatgcggcctctcccgcataagcagaccccatcagggcttcatagctattgagcgatgcgagctgcacatgcacggtcggcaactgatccgggtccggaccgaagatggctctcaaggccatcaggtcgggcagtttgcgggcgtcgagcgttctggcaagctcctcggccagttcacgctcgcaaccgcgatcatgagccagggccagcaattcgacggtgatcttgcaagcctgccggtcaggcagttgctcgatgagagcgtcgaaagccctgcgatattccggccgggggaagagcttgtcgcgatagaccaggttgagaagcgccatgggctttttgcgcagagagtggatgacgtggtgatagttgacgacctggtcatgcttgccgctcgcgtgggcgcgacctcgtggcaacgtcagcagatgcgtgccgccgatgaagacgtcgagacgatcgtcaaacaaacgcacacgcagccgatggccgatcaaacgggaggggacggtgtagaagactttgcgcaaggcgaagccgccggtgcgcgacacggtgacgactacctcctcgaagtcggtggtgcggcgctcgggaagcacctgcagatgcgggcgctcggcatcaatgcgcttgccatgcgcggcattgcggcggctgacgatctcgtcgatgaaggcgcggtaggagcgcagatcgtcgaagtctctggtgccgcgcatcaggagtgcatcgcggactgcgttcttgagatggccgtgggagctttcgattgagccgttctcgtgggcgacgcccttgttgttgcgcgtcggcgtcatccggtagtgagcgcacagctcctcatagcggtttgtcagatcgaccttggcatcggcatcgaggttgcggaaggcagccgacaggctgtcgctgcggtgatagagcggcgaaccgccgaccgaccacagggcgttctgcaggccctccgccaaggcgacgaagctttcgccgccaaggatgacatgggcgtgctcaaaacccgaccaaaccagccggaagtgatagagcagatggtcgagcggttggccggcgatcgtcacgctgaggctgcccatgtcggtaaaatccgacagccctagtcggccgggctcgtgcgtctggcggaagatcacctcctgtgcttcaccgtgaaccgcccgccatgaccggatgcgccgctcaagtgtgcggcgaatgccttcgggcagttccggatgacgccgcagcatctcgtcgtaaacggcgaccgcacgaatgccgggagcggccttgaggagcggaacgacctccgcatcaaagatatgctcaagcggatcgggtcgacgccgaccgcggggcggcttgttctgcgacggaaggcgctgctctttctccatgcggaacgccgtcgcccggctgatcgacgccttcgcggcggcgacctcaacagaatgcgtttgtcggtacttcatgaataatctcatctgatgatcggttacatggcgacccggcacaaaggtggttctccattccagaaaaccgccaccgtagcgggccgaccgcgatcatgagacgcctaaaaattgcgccgcggcgggggtgtaactccggtcgggctacgccctcccttcgtcacacccccaccgccgagtctcatcctgattgacgctgagtctcaccttgtttgtcgccgcgcaatctcgcgtgtgacgtcaccaatgcgcttctccaattggcgcagatcggtgaacagctctgcgagcagcttacgcatcgccgacgaaaggtcgttttgattggtcctcgagaaccagtggcaggtcgagcttgaacagacctgcgccctggcgtagggcgaccccgtgttcgaggcagaaggctcgcatctgattgatcagacgcgttctcgttccgatcatctggccccgcacccgatgcaaagcccgaagatcggcttgttcctcgctcttgagtgcagcaaatcgcatcgttggtcgcgtggctgcctcagcgatcgcctccgcatcgatgatatcggttttgttcgactttacgtagggcttcacaaactgcgcggggatcaagcgcaccttgtgtccgagcgcctgtatcttcctggcaatccaccgagatcctgcgcacgattccatccccacgatcgccggtgctgcgcgcgcgaagaactgtaacagcgtgtcgcgtcggaaaccaaccttctggactggcacgccatcgctccgaggccgacgacgtggaatatactcttgccgatatcaattccgtagacagccgctgggcgcggcagattgcgttgtggtattgcaacctccttcggtttgacagcctcagaatgcggcaggaggacaaggcggaccatcccattaatggtagggcctgccgccaagcgtgaagccggcgcgcatctgaaggccgtcatgggtctgtcggagcggcgggcctgccagatcatatccgctgaccagaaaatggtgcgctatcggtcacgccctataacttgaaccgcccgcacacggtcctcaacggcttgaccccaaggagcagaaggctggcgcgaaggtggcccgacctctgcagcatgggatttcagaagcaacctttacaactggaaagccaaatacggcggcatggtgctttccaaggcgaagcggtctcttggccttagcctttcgtcttggcccgctagggacggcgtgccctaggatgaagatcgtcccctcgcacttgtgttcagctttgtccgtttgagacttccatgtgcgaaaccccagagactgagggcgggtattccgtcggcgtggcgcgaaaaaacgtaagttttctccccttgttctcattcgttggcacgccgattgcattggactccgtgtaagcgcgtgggatgagaccaactgttaccctcgattagcgaccaaattcgagcaaatgagagtgacagttaccagacaaccaaggagtagctcatgcgaatagccgtcgtgtgtaacagtgcttttacgggtgtaatcaatcggttcggtcagccttatccgcagccgccgcagccttggccgcagggccggatagcggacagcgtggtggcggccctgcaagaatgcggccacgagacgctgctgtgtgaaggcgacaaaggactgctcactacgcttgagcggttcatgccacccgatccgctagcccgtacttcgggaatggtcttcaacttggccgagggaattcagggcgagtaccgtttcacccatgttccggctatgctcgagatggccggcgtcccctacaccggatcgagccctctggggcatgggctgaccgacgataaggtcatcagcaagacgcttatgcgcgatagcggcgtgcccacgccgaactttagtattatgcgccgcggcaccgagagtaccgacgatctccgattcccagtcgtggtgaaaccgcgtcacgaggacaacagcttcggattgcagctcgtacatgagccggctcaattgcagcaagcagtgaaaatgatcgtcacgaagtatgcgcaggatgcgcttgtggaagaatacatcgatgggcgagaaatccacgtcgcgctgttgggaaaccaagaagtcgaggtgttgcctatggtggaatttgagcttggcgaacacgaagcccctcttctaacctgggaagcgaagtacttggcggccgtgcagccgccaaagacctgtccggcgaaaatcgagagcaagctcgcgactttgctgcgggatatttctgttgcgaccttccgcgcctgccagtgccgggattatgctcgcgtcgacctccggctcgaccgttccggccagccctttgttcttgagataaactcgatgccgggactcagtactcactccgcttatgttttagccgcgatgactgccggacacagttactctagcttgatcaatggcatcctcgacgtcgcccataggcggtacttcggaaacggcatcctagggtgagggtggttcagtcatcatagcccaaagatggcggcaactgcgatacagatttccgaaaaaggtttaggcgtatcggtcgcagcagctgtcaatctgatccacgcattagcgagtgtcatacaggaatgatagctgcatgcggctcggtacggcggatgccccttgtctcgatgctcttgtcccgatcaagccggaaagcatggatgaagtcgacggctaagagttcatgaacgtcgccgcggtcgcggtcgcgcacaaaacgacacgcgccgtaggaacagtgcgggtttgcgaggagaggtgaatgtgacgacaaaccggtatggtgcggtttgggaaacaccgatgagacgatgcaaaagagctcgtccgtttgactggcctccgatcgcgaataccatcaaggcctgcggtcaagcagctcgcacaaacatgccggaaactgaccgcaagcaccgtgtctgccgtgatgttcaaattacacctgtaaacatggagagattcacactcgtccctatgcccgatggtcgtgcggtggcttgccacgtacgggccccggctgccgcggctcatatttcgccgagcgctctcgcgtctcttgcactgccaaaaaccgttcagcccggcggaacaattctcgcccgtcgttgaatcaaaaagctagcccagaacaccaaggaagaaatatggagaagtgctcacacgagagcggtcgtcattcggcggagaatgacggcaaatacgatatcactggttcgacggcgacgaacgtcgtggacggtttcacaatggtggcagttggcgacgttatcgtgtcgcgaaccctggcgaacgggcaccatccgggctttagtgagatcgtcgagctcctgcgagccgcagacgtaactttcggcaacatggagacgctgatcttcgacatcagatcattcaatggaacaccgcaggctgagtacgggggggcgtatcacgtcagccttcccgagattggacctgatctgaaggcgatggggttcaatattatgggccgcgcaaacaaccattccttggactggggcgtcgaaggcatgcgtgagacgagccggatcctcgatgagagcggcatcatccacgccggtgtgggtgaaagtcgcgcacaagccagcgctgcacgtcttttagaaacggcccgcggtcgcgtcgctttgctctcatgcgccacctcattcacgccgatgtcgcgtgcatgcgatccagcgggcgaggcaccagccaggcctggagtcaatgcgctccgtctagagagaagcgtcgtcgtcgagcccgacatgcttgagagcctaagaaagatacgtgatgccttgcccaatcctgggcctaaacacgatgatcgcgaaatgttggtgctcgcaggaacgacctatagaaccggcaaagacgtcggctacacctatgcggctaatacgcgagatctggccgatattttaagaaacgttcggcgcggcaagcaatattccgatttctgcatttttacaaaccacgcacacgagccgggaaattggagcgaagagccggccgattttgagcaggcgcttgctcgcaagctaatcgatgcgggagcggacgcgtacgttggacacggaccgcaccgactgcgtggcatcgaaatctacaaacgccggcccatcttctatagtctggggaacttcttttatgatgacctccggacacccgttggggcggacatgtacgatgtgtacgacaaggacccacaggtggacaccgatgccgaagtaaccgcagcggaagaaacaatgggttaccctacggctgcagggttcataggcgcgctcgccgaaccggtgtattacgagagcgtcgtcgcagttagccgctttgaggagaaccaactggccgaactgcggctttatccaatcgagctcggttattccaaaaggcttgcgaacaggggcgtccctagtcttgctccacgccctcaggcaatctcgattcttgaacgcctgcagaggttgtcagagccgtttggaacgagaatcaccatcgaggaccgtgtcggtcttattagactgtaaccacgcatcgtcacgaacctcccaagctgcgatttctcgcccgtatggggtcgctcttatcggctgagcagggaactgataacagatggctcaaggaaagcgatgttccaagccggtttcagttgacttgtagaactgatccctgcttatcctcgttcgtgtagaaggaatgagggagcggtttggtgtcgctgtctgagagcgagctacatgccaagcgtgcagttgctgatgcggtaccgtaatctcatccgtaaacgccatgatctgccggctcagaatatccagcgaagtgcgtgcataagcccaggccgttggcatcggacagcggttgctgcgactttgccagattagatagcgccgggattggccacaagaccagattctgccaatgcgcccgcagcgcatgtgcgaccatggtgcgctggcgaacgagcaacgctcgcgcgcggtggatcacgagaatgccttgctgctccaccgtcgtcacaggcacgaaccgcatcgtcgggagccgcacagcttcgcagattgcttcggcgtccagctcgctcttgccacgcttgacacaggcatcacataggagagcgggacgctcgtgcccatcgccgcgagcgtgcgaggccaatgatgcgctgttccgcgcgcttccatcccgatcaggcatgatggtagcttcgagaagaagggcagcatttgcgtgtccctccggcggggaccgacttgcgaagttccgcgtctcccgtgagtctgcgctcttaagagtggacttaagagcgcactgagcaattcatgggacatgcagtttgctgacggggccagagcggcgtcggcgatggtcgttggaagatcgcgcgcagatactggcggaggccttcgcgccgggcgcggtggtttccgaagttgcgcgccgcttcgaggtttcgactggcctgatctacacatggcggcggcaagctttggtccagcaggccgagcccgccctttgtgccagccaagcttgttgactctggcagcagtgatgcggtcgaactggccatggcagtggagttcccgaacggcgtgaaggtgagaattggctcagcggctccatgcgacctggcagccgcgatcatgcgagcgctcaaatgatcaggccgcctcgcgcggtggcgccgacttcatccttgcgctaaatgcaggtcgtttgcgcagcatgggtgccccgtcgatcttctccctgttggctctccgcaacagcaacgatttcgtcctcgatttcgcccgatcggagatcctacccttcgccaaggtcccgatcttcttcggcgccagtgccttcgacccccgctcctcggttgaagctgaactggggaggatcgcggaagccggcttcggtgctgtcgtcaacttcccgactgcgatcttcctcaacggtcgctttagggccgatatagagtgcgccggactgggttttcagcgtgagctcgaaatgctccgcgttgcccaagagcgcggcatggcgacactcgcgtatgtctgcagcatgactgaagcagagcaggcggcagaggctggcgtggacatcatcaatcttaatctcggctggaacgtcggcggatccgtcggaagccgcagcgggcttggtctggcacaggcggccgagtacgccaagatcgtgttccggcagataaggggaatttcccaggagatactgtgcctgctcgggggcggcccgatcgttagccccgatcagatgtacgaggcctcgatcgtcgccaaggcagacggttatatcggcggctcgaccatcgaccgggtgccgctcgaagcctcgatggaacggatcacatcagcctttaaatctgttggcaccttgcaaaagcgcatcgatgagctggagcgaaagctcgagcacgtgcagcgggagtatttgactgtcgggcgctcgccgttgatccaccagatcaagcagcggattgaaaagctcgcagcctcgcccctgtcggtcatgattaccggaaccaggaaccggaaagaagctgctcacacgcgccattcatgaagctgccagacgtcctggcagcaaattaatcaacgcgcctacggcggatgttattggcgagtcgctcttcggttcggccccggcgcagggtggacgcgaggtgctcgggctgctccaattccatcccaaggcgacgctggtgattgaggatttcgaaactttgtgcgaagacgctcagaagcggctgaccgaggtcatcgagactggcgtttaccggcggcttggtgataacgacagaggttttcgagggacgtctgatcctgacatcgatgcagccgctgtcacaacttagctcaagcgggaaggtaatctcctcgctcgcttcgcgcctggttcccgggcatgtcttcctgcccaagctacgcgaccgcctggaagacctgcctctgcttgcggagcacttcctgcaggcgctcagaaaggatcggcgcagcctcaagctgtcggtcgattactcggcctaccgccttctgatggcctattcctggccagaaaacgtccgcgaactgcgctccgtgctcgagacagccgccatccgctgcgagggcgattggatcaaggcggagaatttgccgcccttggaccacgcggatatgcgtgaatcgcacccggcaaacgagcgcgaatggatcctggacgcgctccagcgtcatcgcttccgccgcggtgaagccgctcgccatctcgggatttcgcgcaagacgctgtacaacaaaatgcgcgcctatggtctgccattgcagccacgggacagcccttaagctacggccaagcgaccacgccgactgtctattgcggataaggcggcagcaagccatgacaccgcatctcagatgatgtggtctgccaacagcagatgccaacaatgacgcggcgtgctccgaatcccccggaaaaggacgttcccccgcttccgaaaacggcgactggtttagcaaaaaatggcgtaaggaagcataatttctgcgagcgctccctcgataacgcacgatcacgcctttaattcgaatctagtctcacacaccgattgcttcggatggggggacgaatgccgctgttgaatgtatcgccattgaagtggccgataagtctaaagattccggctatgaccgtctgcgtagcggtactgtcctgcacgacggtcgcgacattcgcgggaattacttcagtcgcaacaaccaggagcttgatcgagaagcaccttaattatgtcgctatctcgatgcgagacgcgctcctcacaaaactccaggcgaccaagttcgaagtcgaagggctctccgccaatcctgggctgcttcaactctttaataatacgagtgttggtttcgcggcggtgtcgccaacagacctcacggcagcgtcggtagataaagtcgagagtgggaagtttagtctcgcggcaacaccaaccacgaaattctatgtcgacaattatcaaaagctggatgcttggctcaagccgttggccgccaagcagtcatattcggggatccttttagcaaatgctgagggcgcaatcatctatagcaccggaactaatccggtcggccccgtagatgccaacggatcgatcaacttggccatcgcaagctcagctaacagtcaggaggcggtgatgactgatttcacgcctccaacgttgtccgcaccggggcaggctctatatgccgttgcgatcgttcacccgttcatacctgacaaacgaaatggtactctactgatttccatgagtaccgaaatgctaaatgcagtcatgggtcaagcaaagggtttcggcccacacagcgaagcgctcattgccgggagcgacggcaaacctcgctccttgtcgtccatatccagagacgaagacgctgaagcggtcgtcaacagtgacctgctctcccaaggtataaagacgtccaatttcggcgctcaagaggttctttctgcatcacaacaactgaaatggcaggatcaccagtggtcgatcattgccctagagccggaggcagatgttgtctcggcgtcaactgcaatgttgatcaagattatcggcattacggctgccactgcgattctggcgctggcaatggccatcctcgcctctcgctcaatatcagggccactggcggggctggtgtctattatgaaaagactcgcaaacggtgacataaacgtgcgtgtcgctggtgtcgatcgccgcgacgagatgggcgaaatgtctagagcagttctcgtctttcgagataacgcgatagctagggttgctgcggaggacgatgcaaggagcgctgaagaggcgatggagcacgaccgcaggatgatggagatggagcggtcagagcggctcgacgagcaagcccgagttatggctcaaattggcggaggcttagcagcactctccgatggagtgtttagtagacccatcaccgtggatttcccagaagagtatcgtccgctcaagagcgatttcaaccgcgcactagggcaactcagagagacaatacgaactgtcgcggctcaagccgcgtcgatgtcgtctatcgtctccgaaataagctgcgcaactgatgtcctggcgaaacggacggaacatcaggctatcgtgctcgatggtgccgtgaatacgatggatgcaatatcaaacgatgtaagcgtcacagcgaacgcggcaaataatgctgatgcgcttgtccgcgacgcccactccgctgcagccgcgtcggacgagattgtttcgagcgcaatagcgggcatgttggagatcgaagagtcttctgcaaagattgcaacgatcgtctcggtcatcgaggagattgcacatcaaacgaaccttttagcactcaacgctggtgttgaagcatccagagcgggggaagccgggaaaggattcgcggtcgttgcttcggaggtccgggcgctcgcacagcgatcctctgacgccgccaaggaaattaaggacttgatcaatgtttctacccaacgtgtggagcgcggcaaagagcttgtcgatagcgcgagtgaattgctcaagcatatagccgcgcgtgtcgatctgatcaggaccacggtttccaacattgctgcaacggcaacgagccaagcaaagcatctgtctgaatttcagactacgatcgctgagattgatcaatctactcagcagacagcggcgatggccgaggaatcggacgccgcttgtcgatccttgaacgccgaggcgcagcatctgttggaactaattcaacaattcgaactgggagggggttcttccacccgacagcctcaaagcccgcccacacagagatacttcatgtcgaggtagtcttccagcccatgcctggacccctcccggccaatacccgattgcttgacgcccccgaagggcgcggcctcggatgacatccggccggtgttgatcccgaccatgccatattccagcgcttctgccacccgccaaacccgcttcaggttggaggcgtagaagtaagctgccagaccatagatcgtgtcattcgcctcgcgcacaacgtgatctgcatcatcgaaccgtaacagaggtgcaagcggtccgaaggtctcttcctcagccagacgcatcgttttagaaacatccgtgacgaccgtcggttcgaagaacgtgccggatgatccagttcgacggccgccactgcgaacccttgcgcccttctggacggcatcgctgatgtggagttcaatctttttgagagcctcttgattgatcaatggaccgatcgccacattcggatcaaagccgtcaccgaccttcagagtgcgcacccgctcggtgaacttttcggcgaactcggcatagacgccggattgaacataaatccggttggcagacacgcaggtctgtcccgcattgcggaattttgcctgaatcgctccgtcgaccgcggcgtcgatgtcggcatcgtcgaagacgataaagggggcgttgccaccgagttcgaagctgatcctcttgatctggtcggagcactgacgcatcagcaaccggccgacctcggtcgagcctgtgaagctgatcttccggaccttcggattggtgcagagttcgcggccgatcgcgtccccctccgacgcatagaccaggttcaggacgccgtccggaaaaccggccagttttgccaatgcaaacatcgcgcctgcgaccagaggcgtctgctcggcgggcttgagcacgacggtacagcctgccgcaagcgccggcgaaatcttgcgcgccaccatcgaggcgggaaagttccagggtgtgatggcgccgacgacgccgatcggctgtttgatcaccagcatgcgccggtcggtcgatggcgccgagatggtttcgccatagatgcggttcgcctcttccgcataccattgaagataggctgccgcatgctgcacttcggatttcgcctcgccaagcggcttgcccatttcggcggtcaggatggctgcgaggtcatcgctgtgttcaagaatgaaccggtgccatttccagaggatatccgatcgcgcccgcgcggtcagtcccgaccacggttcctgtgcggcatcagccctttcgatggccgcgtgggcatcggcagcacccatatccggcacttcggccagcaattcgccggtggatgggttaaacacggagaaccgttgccgctggccagcgaccgaagggtgcggttcattggcaaggttgcgaaaaagctcgggacatttcaggtgccgcgtcaatgccgatgtcagtgtcattcttcgttcctcccacgcgcgttcgattgcgcctcttcccgcctgtcgcgaaaggcaaagccggagcaatgatcgccattgcgccggctcgtcccttggactgctctctccgttaagtcagagagatgacggcttcaatctcgaccttggcaccttttggcagcgccttgacttcatagcaggcgcgcgccgggtagggggtggagaagaagcccgtgtaaacgcgattgatgtccgcgaagtcgccaaggtcggtgagcagcactgtcgtcttgaccgtcttcgacagatccgtgccggcggccctggcgatcgcctgaaggttcttgaggcattgttcggcctgttcgacagcattggccgaattgaactccccggtggccggatcgattggcaactgcccggagacgaaaagcagatcgccaaccttgatggcctgggagtaggggccgaccgcgccgggggcatcgtttgtagaaatgggttcgatcaaagttttagtcctccattggtatccagtgagtgctcaagcgtagcggctgacggcgaggtcggtggcgtcgatctcgggcttccggccagataccaggtccgcaatgacgcgggcagagccggagctcatcgtccagccaagcgtgccgtgcccggtgttaaggaagagaccggcgatcttcgttgggccgatgacgggcgtgccgtccggcgtcattgggcgcagacccgaccaataggatgcttcttttgcatcgccgccgggaaagaggtccatgacggaatgctcgagtgtgcgtcgccgggcggggccgagatcattggtgtatccggaaatttctgccatgccgccgacgcggatgcggtcgccaaggcgcgtgatggcgatcttgtacgtctcgtccatgatggtcgattccggcgcccgcgaggcatcggtgatcgggatcgtcagcgaatagcctttgaccgggtagaccggcagcttgatgccgtgacgcttcagcagtagcggcgaatagctgccgagtgcgacgacaacagcatcggccgcgagcctttcccagttggttacgacacccctgaccttgtcgccctcgacatccagtttcctgacttccgtgccccaggagaagcggacgcccaattgctccgccttcttcgcaagcgcgttggtgaacttgaagcagtcgccggtctcgtccttcggcgtcagcagcccaccgacgatcttgtcgcgcgcgggtcagcaacgcgaagctcgccgtggaagttgggctttcgccgtcagcctgcctgaggcgtatcaagcttatggagcaggcaggtgtcatcaggggctatacggcgcttgtcgatccgacgcagtcggaatcgaccatagccgtcatcatcaacattacgctggagcggcagacggaggagtacctcgacaagtttgaagcggccgtgcgcaagcaccccgaaattagggagtgctatctaatgaccggcggatcagactacatgctgagggtggacgtcgagaatgccggggcattcgagcgcatacacaaagaggtcctgtcgacgttgcctggggtgctgcgtatccattcgagcttctcgattagaaatgtgttagcgggccgtctgaaagcaaaaagatgaaacttgcccatttgagagattgcgcggcagtgaggtaggctgtgtacctcatatgaccgctgcccctcaagatccgcaggggctacaggccacagaagatgtgagctcagcaatcgaaggcactaggtcgtggtgacgatttaacggattgagattcccaagaaggggcaaatcagattcaacactgacttttggaggtcagtgatggattgcgatgggcttcgggacgatcaatgggaacgtatcagaggttttgtgcccgggggcacgaagggcaagcgtggcccgcgcacgaacaaccggctgtttctggatgcgctgctgtggatggcccgttcgggcggccgctggcgagacctgccagaacgactgggtgactaccgcgccgtaaaacgacgctattaccgctggatcgagatgggcgtgctcgacgagatgcttgccgtgcttgcccgcgaagctgatttggaatggttgatgatcgattcgactatcgtgcgcgcccatcagcatgcggccggggcgcgcagggctaaaggggggcggatgcccagggcttgggtcggtctcgaggcgggctgagcaccaaaatccatgctgccggcgatgcgctcggcctgccgcttcgcctcatcggcacggcgggacagcgcaacgacatcacagccgcccatgatctcgtcgacggtctccacgccgatgccctgctggccgacaagggctacgatgccggacatctcattgagaaactggagaaaacaggaactgaaatcgtcatcccgcccaaacgggatcgcaaaatgcaaagggcctacgacgccgcactctataaagaacgcaaccgcatcgagcgcttcttcaacaagctcaaacagttccgccgcgtcgcgacacgctatgacaagttgctcgccaacttcatgggctttgtcaaactcgccgctatcgccatatggctcaaatagttaaatcgtcactacgacctagcgggcctatgcgctatcttcccgtcgcgtcacgacgggaagaatggcttgaaacgcgattcttaattgacggctgcatggctgcttgccaattcgccagccgggtcgacaacagcggacggccccctccgcggcggttgacccggaaggttgtcgcgaggcggcatcgagacgatcgccgcgcccacatcaatggcgtcgatctcccgacgccttctttatttctttgccgccgagcaatagcttgagcctcgctttcgcgtcggtgtgtgccaagcgttggaagctttggcccgaggggtttcaacgtccgctttgtcccagccggtggagaatccatgccatgcgaaacgcggcttcttctgctactcctggtccatgtgacacacccatatggccgccgatcatccgagtgcggaagattaggtccggatcacgatcaacggcctttgatcggcgctgcgcaacatagcgagcgggctgatagtagagcacctgactgtcgtggagggccgcgtcgatgtatgtcggcggataccgtcgatcaggcgtcagattatagtaagggtcatagcttcgtagatattgatagtcgttagcaagatgcggatctccatactctgcagtttctcttagggcgtatgggagcgtgaagtccaactccgtgtcgatgatatcggcaagtggaacctcggcgagcacagctcgaaaaaggtcagggcgcaggacagcggcggccagaaccgtaccgccgccagcgctcctgccctcgatgacaatgccgtcacggctggcgaaccgatgctcgacgaggcactcggccgcagcgatcaagtccgtgtgcgtcagtcgcttttgatcgcgggtcgccgcttcgtgccacgcccgaccgagttcgccgcctcctcgcacgtgcacgatgccaaaggctaccccgcgatcgagtaggctcaagcgagcggtcattgatgaaggccagccaaagaaagccggtaagctttgtgctccgtagcagccatacacgttcagcaaaaccggaccgtcttcacctctatctcgccgcgctactatcgagattggaacctccactccgtcctctgccttcgccattacgaccctagcctcgtacagttctggttcgaaacctgataccagggttcggtagaggactttggacttatccgttaggaggtcgtgttggatgaatatgtcaggcgtcacaaaagaacagattttgtaggtcagcgcagagacccggtaaggatgtcgtgcgcaggagtagctgccgcctgccgatagaccaacggtcacggtgcagctatgttcgacggggacgatactgggcccgactcgtccatttcggtggtgcgcgactaagcgaggttgaatcccttcgcgctctaacacaatcacatgctcttcaaggacatgaatctcctcgagcgttatgccggcccgatgtggaaccacttcctgccagcgcgacggtgaggtgtcatcaatcgccgtgcgcacgaggcgcaaattcgggccagtgtcgttaactcgaaaaagaaactcgttgccccagtgttccgcgtagatctcgtgccccagttcacgtgcaaggatccggcgccacatgtctgtcggtcgttcggcaggaagacaccatacctccgcggcggcgcgctggatgcgagaagacatgtccgaggtgatgatcacgtctatgaacaggtaagcgccgctgcccgaccgccgaaccaccagggccagtcgctcattcacttcttcgaacaccacctcggaacgtccggtctcgacgtccaatcgaacaacacggtcgtgttggcgccgatcggcgcgctcgcgcgtaaagaagagcgtgcgattgtccgctgcccaaactagtcgcccagcgcgggaggggtcgcgccagatctcgcggccgttggtcatgtccctcactctcaattcgtagcgctcgttaccgatgaggtcgaagctgaatgctatgtagcgaccgtcatcgctcggttcgagcgcgccgagagaatagaacacttctgccccagggagcgtgttcggatcgaagacaagctcttctggacctccagttaccggccggcgccaccatgctgaatgtagcaagccgctttgacttttctggaaatagaaaaaaaagccgacttggaacggtggtggtgcgccatcgcaagaatctcgcttctcgatttcggcgattagatcggctttgagttctgctacataggacgtcacttcatccgcgtaatggttctcggcttctaaatatgcgaggacatcaggatcttccctgtcgcgcagccagccgtaggagtcgatcgtgacgtcgttatgaagcactcgaatccggcgttcgcttcggggaagcgggggctgcagggacttattttccatcagaatgctcctggaattggattgcagacatagcgttttgcagggctgagccaaagccgacggttgccgagcaacaacgggaagaactctgaggcgtcggaaggcgatgggtccaggaagttgagccaacgctccgtgttcgcgaaccggtcaattcccctgtgtggcaagccgaccccgcggaggcgcacctcaagctccccaccaatggttgcagaacagcttgcgacaggcacggctcacttctccgggtttatacgtcagtcccagctagaaaggcttctgcggccaagacgaagtaagaagcttaagcccagggccacacaataattcggaaacgaaggcgcttttgggcgcaatgtaggtgagcacgacggaatcctgcaaagtttcgcccgctcgcgctttaatgcggcgaggcgcggctgtctcaacgccagatgcggaatatcatcctccgattggactgcgtgagcaaaatttccgcgtcgtgggactggaaaagtccatggacgtgcaggattgctgcgagatgagcctttaaacacccgaagcctgcaattcttgcgagtctttgcaggatcactgcagagccgcgccgatacaatcgggcgatggaccacgattcatctcaaaacaggggagcaccaaatggtcgacgtgtacagcgaagtcatcaaattctttggcgtacgtccgaaaggcgctgcactagcgagtgccgccgtgtgcctactcgtctgggctagtgcggcagaagcggtgaccctcgaggaagttaaggcacgagggtacattcgaattgcgatcgccaacgagattccagccagctacacagatgctaacggcgacgttaaggggcgagaagcggaagtggtccaacatgtccttgaacgcatgtgcgcgcttcgcaaaaactggacattgattccgctaaatcccggacagcaatttcattaaagtccggacagtttgatgcggttggtcctcggcagcctggttagcatcagggctgattgatttcgccgttttctgccccagtcaagaggggtgcgcttttttgctttcgcatgctctcgccccggagggtgatgcggtgagcattgtggacgatacggtcgagtatggcgtcggcgaccgtgctgtcggcaataaggtcgtgccagcttgccacgggaacctgagctgtgatcagggtggactttcgctgataacgctcctcgacgatttcgaagaggtgaaagcgctgctgatcggagagcgtatgggttccaaagtcatcgaggatgaggagctggacgcgggtgagcctgtcgatgaggcgggggaaggagccgtcgaggcgggcaagcgcgagctcctcgaacattcggggcacgcgcacatagagcacggagtgaccgagcctggccgcttgcctgccgaaggcacaggccagccatgacttgccggtgccggtgtggccggtgatgatcaggccctcgtgggcggtgagccattgcccctgggcgagcgccatggtgttgcgccggtcgagaccgcgggcggcggcgaagtcgatatcttcgatacaggcctgggcaaagcgtagcttggcggaggcgagccggttacggatgcgcttgtcggcgcgcagggtgacttcgcggtcgagcatcagtccgagccactcatcgcggctgagctcattggtgccggactgctcggtcaattcgcgccaggcggcggccatgcccgtcagcccgagggcctgcatctggtcgagggtggggttcgtcagcattcttgcttccttcactggtagtaggatcggccacggatattggtatgcgcaggcgtgggggccgcgtgttcagcctgcggtctttcccggtcgaggccggatttgaggatggaggcgacggaggaataggtgatggcattaatggtgagcgcccgctcacaggccgcctcgaggcgctgggatccatagcgcggcgccagcgacagaatgcccatggccgagcggtatccctgttccggatgcggcctgtcgcgcatcatgcgttcgaccaggatggcggcattggggccgatctgggtcgcacggccgatcagattggccggcgtggtgttggcatagcgctgatgcgccttgggcatatggtcgttgacggtgacgtggccggaacgctgggagcggcgaacatggctggcgacacgctggtggtcgtggaagatctcgaccacccggtgggtgagccgcacctggagggtgcatccgatcagccgatgcggcaccgagtagaaggtcttgtcgacctcgacatgatagtccggatggaccttcgccgacttccattccgcatattcgaacggtatcgccggcaagggcttcaaggctggccgctcgatctcctcgaacagctcgcggcggcttttgccgacatggcgcatcgtccggttgttcaggtcctcgagcaattcggcaatcgccgtgttgagggcggcaagcgagaagaaggtacggttcctgagccgggccagaatccagcgttccacgatcaataccgcgccttcgacccggcctttgtcgcgcggtttcctgctgcgggtcggcaggatcgtggtgtcgtaatgctccgccatggcggcgaacgtcgcagtcaatgtcggctcgaaccaaagggccttggccacccccgatttgaggttgtcgcacacgattgccttggtgaccccaccatagaaggtcagagcacgcacctgaccgtcgatccaatccggcaactgctggctaaagctggcatgggcgaaggtcaggttggaggcgcccagcaccgcgacaaagatttgggccggatggatgacaccggttgccggatcgatcaccggcaccgtcggcccggcatagtcggtctgcatcacggcgcccgccgcgtgccgattgcggaacgctacactggtgcgctgccgaaaggcggcaacctgctcgcagaaccaggtgaagccgtaaccatcaggatggctggcgcggtattcctgccatagaagcgtcagcgtcacgcctttgcgcttcagctcccgaaccaccagcgcccagtccggctcgctgagatcgcgcggcggtcgaccggctcggccgaacagccgccgctccagctttgcatcctcgtccgcgccgattggcaacggccacgaaagcccggcttcccgagatcgcagcaaataggtcgataccgagctcttgccgatcttcagccgctcggcaatctcgcgcaccgaaagaccctcttcatgggtcaggcgcagaatagtccggatatccctcactgtcgttcgtcttgcttgcttccgtctcggcatcggcccctctcaacgttgtcgtgagaggcctaaccaacaagacggcgcagccgcgaaccaacccgtcaaaccgccgccggaaactgtccgggatttagcggaatcgctgtccgggaattactgaaaactgtgtccggagattaccggaaatcctgtccggactttgccgaaacccgcacgcatggacatcaagcgtgaaaacatccaatggatcgttacgtcctttagctctttgataccaggcttacaggcaaatcgcttcgacatgacggcagctggaatggctatccgcccagaaagatgtcaaaaggtaatctatagcgagccaaccagttcctatggcgagggtctactggtcccaaaaggtaatcccaaaaatcttcactcttacgaggacattaccacgcaaggtaaagttgcgatcatggccggtgctgaccagctcagaatgatgcagaagctgggtgttgaagaaggaaatattatcaccatcgcatcgaatgcagatgctattgcagctgtctctcagggacgcgctgacgcctacgcagcatccgccactaccgccgctgatttggcaggtaagagcgataaagtcgaactcgcagcaccctttaaggatccgattattgacgggaagccccaaaggagctggggcggctatacgttcaataaagaatccggcgaccttcgcgacgcgatcaacaagtcgcttcttgagtttcaaaagactgagaaattcaaagagattcaattggcgtatggcatgacaaaggaaagcattgccgcgatcccaacgaaaaccaccgatgtcctttgttcaccgtaaagcggaagattgatgggtcgctcatccagcgacccattcctaagtccttctttcgaatacgactcgcgacagccttgtgacaaccattgtgaccgggtgcaccagcgacactgaatgggacaaaagtctacaaatgcattcagaggagcgttgcggcctcagcagaccaacacgctgttcctcgcgccaagttcgggtttcgaggtctttcaattaatggaacgcagtttcgagcgtacgggcgtcgttcctcggtgattgacagccggagaaagcgtcattatgcaggatgtctgcaattctcaagaaatcctgcaggattacgctatggaacttgatcgggcagatgtggcgctcctcaatgccgtacagaaaaataaccggctcacttccgaagaactcgccgacaaggttggcctttcacccacagcatgtcagaggagacttaaacggctccgtagcctaggtgtgatcgaagcggatgtgtccatagtgtctcccaaggctgtcggccgccccgtaacgatgattgttatggtgtcattggaacgagaacgtgccgatattgtcgacaggttcaagtcctctattcgaaatacgcgggaggtaatgattggttactacgtcacaggtgatgcggacttcatcctaatagtgacagcaaaggacatggaggaatacgaggagtttactcggaggtttttctatgagaatcacgacatcaagggctttaagaccatggtggttatggatcgagtgaaagccacatttgcagttccaatcgaaatctagtccgaaactatcgtgttcgcccgacgccatagccggcgaactcgcacaaacgtaggctggcgcgacctgctagcgcaatgacctggaggccggatgaagtgccgtcggtcaatcatctggggtagcgtgaccggccctggaaatagtagaccccttctgtgtctctaacataaaggcgcctgtccactaggacgcgatcctcgtacgccgcacgtgtcagttagaaaccagcagtacaggaggacgtccgccaatccctcgcactgtcagtcttcggactagaagcagagcgcattacaaccccatgcggggaagtccgggtggttcccgtccaaaccctgcgaaacccgcctgaattttactgatttcctgcggccgaggcagaaaaatgccgaatcctggcggccgagtgcattgatcatccccagcggcggcttcgtaagcccgctcaaaaaggggaaccaaatgacacatctaaagatctccaaaaccgcacctgctgttgctcgcttccttcctgccggccgcattgcgagtgtggctgcggccctaagtttgttcttgtcagcgcagcttgcaggtgccgtgacgctcgaggaagtgaaagcgcgcgggtacatcactatcgcaatagcgaatgagatgcccggcagctataccgacccgaacggcgaggtgaagggctctgaggccgatgttgcgcggcgcgtcctcgagaaattggggatcaaaccagagaacattcaatgggtcgtcacgacttttgggtcgttaattcccgggctgcaagccaaccgctttgacatgaccgccgccgggatggccattcgaccagagcgttgcgagaaggttatctacagtgagccgaattccagttatggcgagggaatgctggtgatcaaaggcaacccgcgaaactttcactcctatgaagacgtggctcaacaggggaagattgcgatcatggcgggcgccgatcagttgcgaatgatgcaggcattgggcgtcccaaacgagaacataataacgatcgcagcaaatgccgacgctatttcagcggtcgccaccgggcgcgccgacgcctatgcagcggcggcctcaactgcagccgaccttgccaaaaagagcgacaaagtcgaactcgccacgcctttccaagatccggtcatcgatggcaaaattcagcgcagttggggtgccttcagcttcaacaaggaatccgccgacctgcgtgacaagttcaacgaggcgctcctggagttccgcaagacggatgagttcaagcagctcttgctcgggtacggttatttgccagagtcgatcgcggcgatacccgacaagacgaccaaagagttatgctcgaattgaggcagcaagaacgattgaacgtcgaccgaaacatccgtcgacgtctctccggtgcgaacgcgccgcgtctaccttccacttaaaggcgagctatcaatggattggcacgactacctcggaccgttgggtcgtggcgcctgggtcacgatccaattcactctttactctatgttctttggggctgtctgctctttcgcgttcgggattggaaagctttccaagaacccgttcgtcaaaggcttttcaatcctctacattgagatcttccgcggaacatctctattggtccagttgttctggctctttttcgccctgccgatcgccggggacatgatgggcatcgatctgcgactttctcccgtagtggctggcgttctcgctcttagccttaacctgggggcttatggtgcggaaatcgttcgaggggcaattcaggcggtcagtcctagtcaatatgaggcagcaacggcgttgaacttcagctcgtcacaagctctctggcgcgtggcgttaccgcaagcgatcccggagatgatgccgagtttctccaatctcgcgatcgccgctttgaaagatacctcactggtatcgctcattacattgcatgacttgactttcgccgcggagcaactgcgcaatttctaccaagatagcacgaccgtatatacaatggtccttcttatgtatttcgggatagcactcgtactgtctttcttcatgcgcctcatagaatcgtcggtaacccgctggcgcggacatcggaggtagaaatgctctacggttttacatgggataccggcaacggagagttagcattcgctatttccattttgccaatgcttttgatgggattgataaccactctccaggcggcctttctgggcttcttcgtcgcatgcgtcctaggaatggtgttcgcggttttacgggggatgcgtacgagatgggtagcctggccggccgctgtcctaatcgagttcataagggacacgccattaatcgcccaattgttcttcttgtactatgtacttcctgagtatggaataatattccctgcctttttgaccggagccttggcccttggcatccagtatagcgcgtatatttccgaagtttatcggggcggaatacaggctgttgaccacgggcagcgggaagcggccaagtcgcttgatcttcctcctgcgcgcacgtttacgcacgtgatccttccgcaggccattcctcgtgtcatacccgctctcggaaattatctcgtctctattatgaaggacgttcccgttctttcggtcgttacaattgttgagatgctaaacgcggctaagatcatcggagaccagactttcaattatctcgtgccgctttctatggttggtggcatctaccttatcctaacaatcgttgcctcggcgctcgttcggatcgtcgacgtcaaccttcccaaaagaggggttcccctgagatgagtgactccatcatcgttttcgacaaggtaaaaaaggcctacggcaatttcaccgtgatcaacgaactcgatttcgaggttcgacgtggggaaaaagtatctatcattggcccttccggctccggaaagtcgactgtccttcgcatactgatgacgctcgaaggcatcaacgatggagcagtctacgtgggcggggagcctctttggcatgagctaaagaacggttctatgatgcctgcgacagaaaaacatctcaggaagatgcgcacccaactgggcatggtctttcagcagttcaatctctttccacacatgacggtgctcagaaatctcacggaggctccgcgggttgtactcggcctatcgaaagaggaagcgcgccgacgtgccgaggaacttcttgagttggtcggcctagttgatcacgcacataaatttccagctcagctttcggggggccaacagcagcgtgtggggattgccagagctttggcgatgcgaccgaagattatgctgttcgatgagccgacttccgctctagatcctgaactggtcggcgaagtccttaacgtcatccggaggctcgcggccgagcacgacctgacgatgctgatggttacacacgagatgagattcgcgcgcgaaatatccgatcgtgtctgcttcttcgacaaaggacgaatccgtgaagagggcacgccagagcaattgtttagtcagcctaaggaagagcgtacgcgcgaatttctcaaggcggttcttgacgggtgatgattggcggccggccagtgggcccatggccagcagcgtgactgcttcaatttgagatccgaactcatcccgagccggtgcattcctatctcgggtgccttcttgccgtcgcgatgatcatcgcgtttgcgtggacaagcggctccgttttggcagtactcgatcgggctggctggtctcggcgccacaggatcgacggcgacgtaggcgcctcagactcgttgtacgggtgggacggtcgagccgtttgtgaggcaacgaaatgagcttaatcgccaatccaccgtacctaaaagattcgcattccgcttgcgtcctgcgcaaacgaatggaagggccggaatctgcgtgaaacgctcaccgaacgccggaatcctgcagcatcagcacctaaatcggcaaacctgctcgtctgttgatgataatctagtttcaaacagctttattggatgagggcagcaatgaacttccgtatcaataacagtcttctaatcgaagccgagcgcgacgcggttcttgaattgcgtcacgcgatgcatcgggagccggaactttccaacaacgagtggaaaacgcagcagcgaataagagggatgcttgagcggttcggcctgaaaggggcgactgttttccataatacagggctctacatcgacatcgaagggtctgcttccggaccaaagagagcggttgctgtccgcggcgacatcgatgcccttcccatacaagaaactcgcgatgatttgccgtaccagtctcacgtggagggagtgatgcatgcttgcggccacgacctccacgcttccatcgccatgggggtggcgttggcctttcaccgaatgcgaaacaatttcgctggcaaactgcgcgtcttttttcaaccggcagaagaggctgaaccgcttggcggtcgcacggtgctcgaagagcgactccttgagggcttcgacaatgctgtgggcttccatgttaccccgtcgatacaggtgggcaaattcggcgcccgcgaaggagcagtgagcaaatcgtcggaccaattcaaggttaccgtgtctggcagtgcagcccatggctcaacaccccataatggcatcgacgcaattacgattgcggcagcttttgtcaacgaagtgcagaaggtcatttcaagggaagtgccggtcgatgatcgatcggtcatcacgataggcacaatccacggcggagaggcgactaatattatttgtccgaaggtcgtgatggagggaacaataagaacgacgaacccagaactgcgaccgctattgtcgcaacgggtgagagaaattgccgaaggcgtcgcagcacttcatcgcggaaaagccgaggtcgtcgttacatcaggtgaaccggcggtcatcaatgaccccgaaatggtgcgcctcttccgcgacgccgtgtccgatatggcgggttccgacgcgttgacgcagggcaaggccattagcgggagcgatgacttcggtttctactctcaatgcattccatcgatctatttctggttcggcagtggcgaacccgggaacgagtccggtgtgcatacccccacgttcgcggtttccgacgacgttctcatcccgacgaccgaacttgctgtgaagtattgtttcgatttgctgcatgggcagtctgcacgttgatcgacttgtatgccaggatgtttgccactgtattaggtgaatgaattgtcgaacttaagtctagaatcgatcgagcgagcgcgtgagcggatcgaagagcacgtcttccgtacccctctgacgacatcaaggtcgctaaccgaacttaccggaactcaggtcagcctcaagctcgagcactatcagcgcactggtagctttaagctgcggggtgcgacaaacgcaattcttcaactcagcccgtcggatcgggcacgtggggttattgcggcatctacgggcaatcacggacgggctctttcctacgccgcaaaagcggtcggctctcgcgccaccatctgcatgtcggatcttgttccagaaaacaaggtttccgagatccggaagcttggcgcgacagttcggatagtgggatcgtcacaagacgatgcgcaagtcgaagtcgagcggctcgtcgcggaggaaggcctcagcatgatcccgcctttcgatcacccgcatatcatcgccggccagcgaaccgtcggtcttgagatcgttgaggcgatgccggacgtcgcgatggtactgcttccactgtcgggtggcggcttggctgcaggcgttgcagcagcggtgaaggcactgcggcctcatgcgaggatcatcggtgtcactatggatcgaggcgccgcgatgaaggccagcatcgaagctgggcatccggtacaagtgaaggagtatcggagcttggctgattctttaggtggaggaatcggcatggccaacgcttggacctttcaaatgtgcagagcccttctggacgatgttgtcctcgttaatgaaggcgaaatagccgcgggaattagacatgcttatgagcatgagcgtcagatactcgagggcgccggcgctgtcggtatcgcagcgcttctctccggcaaggtggctgctcgcggaggttcagtaggagtcgttttgtcaggtcaaaacatcgacatgggcctgcatcgggaggtcattaacggagttgtcagagcgaccgaggaggattgatgcctacaatgaaaatactcactgagggggagttgaggcaaatcgtgccgctcgacctcgacgcggttaagtgcaccgaagacgctttccgcgcactcgccgtaccaaacgccgtaaaaatgccgcccattctgcgcttggacgtgcctgacagcaggggtgaagtcgatgtgaaaactgcgtatattcccggtttgggcggttttgcgattaagatcagccccggcttcttcgacaacccaaagatcggccttccgagcacaaatgggatgatggtattgctctcgagccaaacgggtttggttcaagcgcttcttttagacaatggttacctcaccgacgttcgtacggcggccgctggcgccgttgctgcaaaacatttgtcgcaacaagatgcttcggtcgcaaccatctttggagcgggcgttcaggcgagactgcaactgcgtgcgctgactctggtgaggcctatccgccaagcccgtatatgggcgcgcgatcagcttaaggcggaggcactcgtcgagcagttgaagcttgagcatagcttcgccatcagcgcgtccgatgatccacggcaagccgtttccggtgcccatatcgttgttacgacgacgcccgcagaccggccaatcctcgtagcgtcctggcttgaagctgggcagcatgtaactgcaatgggctccgacgctgagcataaaaacgaacttgatccagcggcaatcgcgcgcgcggatgtttatgtggcggatagtcttacacagacacggagactgggtgaacttcaccatgccatagaggcaggcctcatcgcgcgggacgctgcttttccggagttgggggaggtgattgcgggcgtgaaaaccggacgtacccgcgagtcagatatcactatagcagatcttacggggaccggtgtccaggacacggcaattgccacgcttgcctttcagcgcgccgaagaacgcagtgccggaagcctattcgagagctgaacaactcgcgctcctgacgcctcagccatgttgaggcgctgacttctcatctgttcacacgttaccttagtatccgccgtcctgcggacaatcatgcaactaaatgctcagaccatatcctacaggaggcagccatgccggttatcaagggaccccaagtatttcctcgcgccgaattccttaggcgactcaatgctgtgaagctggagatgggccggcttgaaatcgatgcgctcattgtcggcagttctgctgatatcacgtatctgaccggctatacggctaagtccggatatgtgccacaggctctcgtaatctcatcgaatgacgaagagcccacattcatcctgcggcgccaagacgcgcctgcggcgatccaccagacattcatggatcgggacaaagttatcgggtactctgaagccctcatcgggaaccccgataaggacggctatgacgccgtagttgacttcttgaacgaacgcgatggtgccaacaagcgcggtgttggagtgcagcttggctatctgtccgtaagatcagctgaaaagtttaagacgcgcctgccaagcgcgcgaattgttgactgcacccattcggtcgcgtggatccgcatgatcaaatccgatctcgaaatttcgatgatgcgtgatgcggccgcaatcgcagacgcaggagtccaaaaggcattcgaagtcattcgaccgggagtgcgcgaagccgacgttatggctgacgtcgcagctcaacttgcgcgggggacaaacggtaaagcgggaacagatctcgcgtcgatgtatttctgttcttcaccccgaaccggcacatgccacattcgatggagtgaagatgtcatccgcgatggttctcagatcaatcttgaaatcgcgggcgttcgtcacggctatgtctcagcaataatgcggactttctccgtaggtgccccatccgatcgacttcgacgcattcatgacgcggaggtactgggtttggaggccgcgctcagtacggtaaagcctggcgctacttgtagcgacgtcgcaaacgcattctaccgcacgatcgaaaagtccggctttcaaaaggactcccgctgcggatatgcgatcgggatcgactggagcgaaccaactgcaagcctgaaggatggtgatatgaccaaactcaagccaaatatgaccttccacctgatgctcggcaattggattgaagaagattttggctacgtactcagtgagaccttccgtgtcaccgaagccggctgcgaagtgctgacgaagtcgccgcggcaactgtgtgtgatctaaagaaggcagccaacgaaagttggtttctaacaacgtgacccacttcgataatcagacgcaaattggctggttcggccgcggagaagcgtcaattctcaaaccgtcagcagggagccttagcgtcgttggacgcgagcgctctcgaagcgtcaaggaaccaaaatgcgtattcttcatttctcggacgctgagtatcagcagcggatgctccgagtaaaacagcggatgcaagctcaagacatcgatgtcttgattgtcactgagccggccaacatcaactatctcactggatacgatgcttggtccttctatacggttcaggcactgttggtgttccaagacgttgatttaccgatgtggattggcagatcaatagataagcaatccgcaattgttacaacaaatcttcctgatgaacggattataccatatccggacatatatgttcattccccagatcggcacgccgcgcaatttattgcgcaaatgctgttaagggaggctccgcgtgccaagactgtcggcgtggaaatgggcgcttattattatacagcgcgtgatcatgctgaactgcagaaggcattgccaaatgtcgcgttcaaggacgcagagttgctcgtaaattgggtgcgcttcatcaagagcgagcgggaaatcgcttacatgcgagaagccggcgtgattactgaacgcatgatgaaacgggcggtagaagtcgcagcgccaggtgtacgacagtgtgacgtggccgctgcaatctaccatgcacaaatgtcgggcacagagaactatggcgggcttcctgccaccagcccaccacacatggggttcggtgagcgcgctagggagccgcacccgatatttaccgatcgacgtatcgacacaaattctgttgccaatatcgaattgtcgggatgccgacttcgatatcacgcacccatgagcaggacagtctatttcggcaggccgccccagagttaccgggacttagcgtcctatgtgattgaggccgtcgaaacgtcactcgatgctgtccgacctggtgtgacgtgcgaaggcatcgaattagcgtggcgcaagagcatgagcgctcatggcatcgagaaggaaaaccggctgggttactccattggcattgcctacacaccgacatggggcgagcgaacggcgagcataaggcggacggatcttactgttcttgagcctggggcggcatttcacctcatgggtggattgtggttggcaaacaccggaataacgatcacgcagtctttcgttgtaacagcaacgggtcacgaaccccttacggctacgcctcgggaactggtcgttaaagactgacgccagatgggcccgccgaggctatgagcacttcaacgcgacgtgtagtccgatttcgactttcgtttgcgtcgcagccgtcgcctgtatgcgttttttttggactcaattctcaactgctttggcaagcggcgccgtgtcacgtgtccttccatctgatctgcgcgtccaacaacgagctcagaactaaatcgcggccgcgacttctgcaggacgaaaaaagggcggtctggcggcgcttgcgacagttttgcccagtcgtttttcctcggattgcacaatcgatgaacgcgctcgccctccggggcgcaactagagaaggaagcgccttggcctttttcggtcaactcgccaaatatctgaacaggattggaaagcgtgcggaaaaatcgaagccctccgattgggaaaagtatgacgtaaaatatccgaataagccgcattcggtcagaagcgtcaccttaaatgcaggatttcgtcgcagcggaaatcattctgccggaaatgtgcaccctgcgtcgcctatgatcaaagtgcaaggtggctagcggctcgagcgtgagggacgcgccagaccagcgtttcaacgcagtaacaactaaaaagtgggaaccaaagcgatgacaatttctcggcgtgatctcttcaaggcaggcttggctgcaggagctgctctctcagttccttcgcttcttcgggcgcagaccgcagttgcggcggataaaactgttcggatggcactggaaaatctcagcgtctttgatccggtggccacgacagccggcatcagccaaacccatgctctggcgatctacgacacactgttctcggctgactcgcagtctcaacctcatccgcaaatggtggggaactggggcgtttccgatgataagaagacgtacacattcgaattgcgcgacggtttaggatggcatgacggtacccctgtcaccgcagctgactgcgtggcgtcaattcgccgctgggcgcaggttggatccggcggacagatccttatgtcgcgagctagcgacatctcaaaaaaagatgacaggacatttgtcatctcgctcaaggagcccctgggggctttgccaagcatcctggccttcgagggtccgtttatcatgcgggagaaagacgccggactacctccgacggagcaggtcactgcgaacatcggatcaggaccgtttaagttcaatcacgacctagccaaacctggcgcgagtttcacgtacgaccgcaacgaaaaatatgtgccgcgcaaagagccgcctgacggaatggctggcggcaagacggtctatgtcgatcgggtcgtgtgggatatcggcgtgctcgccgacccgcagacttccgtggccgctcttcagacgggcgaaatcgactttctctacaggccgccgattgatctgttgcctctaatcgagagcgatcccaacctgaaactcgaggcgctgaatagggctggtgtggacatgactctgcgcatgaattgccttcaggcgccgtttaacagcgtaaaggctcgacaggcattgctccacctcgtggaccaagaggcagtattgcgcgctgcgtacggcaatccccagtatttcaagcccgtcacgtcaatgttcggcaacacggcagcggttaccaacgacgaaaatacgggatggttcaaaccaggcggcgatcccgaaaaagcaaagcaacttttcaaagaggctggctatgcgggcgaaaaaattgtcattctgcaagcgaccgattgggccgagcaaagcaatgcttcacaggtcgtggcggcgaagcttcgtgaaatcggcgtcaacgccgagctcgcgccgagcgactggggcggccttgtctcccgccgctcgaagaaaaaccccgccaacaacgccggctggagcatctttatcactgaccagtctgaggcaacacgtgccaacgtttttaccgacattagccttgccatgaacggcgaaaaggcatggtatggttggccaaagaatgatgaatatgaggcgctccgggccaaatggttgaccctcgaaacgctcgatgagcgcaaggcgcttgcgcgcgaaatgcagaagctgtggtgggactacgtccctgaggttccgctcggtcaaaacattgtacctagcgcttacagcaagacgcttaccggcctcatccctgcaacactgccgcttatgtggaacatgcagaaggcctgataccgtgggtgtttacattcttcgcagactggtttcgaccatcgccgtaatggcgatggtcgggattttcatcttcctgcttctcaggctggcgccaggtgatccggcggcggtcatcgcaggaccaaccgccacggagcagatggttgctaacatccgcgaggagttaggtcttaacgaaccgttgcctgttcagttcgtccattgggcttctgatgttttgagggggaacttcggagcctcggttttcacgggggtgcccgttctccaactgctttcccagaggttggaaccgacgatctccctgtctgtgttgacaatgatcctttcggtcaccgttggagtctccttcggtgtactggcggcatggcgatctggcggtttcgtcgaccgcgccctcgcgactttttcagctatcggctattccgtcccggtcttcgtcattggctatatcctcatctacttcttcgccattcaaactcgttggcttccggttcaaggatatacgtccatcaatcaaggtgtggcgccctggttcttacatctgatactcccaacggtcactttgagcgtcccctacatcgccttcattgcgcggattacgcggggcagcatgctcgaagtgctgtcggaagactatatgcgaacagctgccgccaagggtgcctcgccatttgccatgctattccatcatgcactgaagaacgccggcgtacccattcttactgtgatcgggataagcttcgcttatatgatcggaggcgtcgttctgacagagaccgtgtttaatgtgcctggcatcggccgcctcgtcgtcgatgcaatcaaaaaccgtgattatcccatcatccagaccgtgctggtcctaatttccggcctgtacgttctgatcaacctactcgtcgatcttgcctataccctgatcgatccgcgtatccggtactaaagatggcccttaccacttcgcgcgcttcgggatcgcctcgtattcaaacccacaccgttgtccgcatcgcaaagcggcatccgctggtcctcctcgggggagggatcctgctgttgcttatcttgctcgcgcttgctgcgcccctttacagcggtgatcccttggtgatggaccccttcaagcgtctccagcagccctccgcctcaatgtggttcggcaccgacaacctggggagggatgtcttcgcccgaacaatctatggagcgcgcatatcactcatcgtgggattgctttcagcagtgtgcgcagcggtttgcggtcttttgatcggtgtaatcgccggctacagccgcacctttgataacattatcatgcgggttatggacggactgatgtccatcccgacgttcttgctcgctatagcgcttctctctctcacgggccccggaattgggattctcatcgttgcaattgcgattccagaaacacccgctgttacgagattagtgcgttccgtggttctgagcgttcgttcgcgaccctatgtagaagcagcgctgtgtggtggggcacgcctgcctagggtgctttggcggcatattttgccgagcaccattccgcccttgatggttcaaagcgcgactgtgtgtgccagtgcgatcatgaccgaggctggtttgagctttatcggcgtgggcgtgccctccgagatcccaagttggggtaatatgatcgccaactcacgcctctttctcgcgatcgctcccttgacgatctttgctcctggactgtgtctcgccgtcactgttctggcggtcaacctgctcggggatggcctgcgcgacatgttcgacccccgttcgaagcggaggcgttaaaatgagaatgcaatcaaatccgaaagccgatctgcttctggacgttcgcgacctggagacgcacttttacggcgaagagagcgttactcgtgctctgggcggtgtcaacttccatgtgaaaagtggagagatgctgggtattgtaggtgaatcgggatgcgggaagagtgtaactgctctttcgattcttcgcttactcccaaagcaaacagctaaaacagtcgggggcgaggtcatcttcaaggggcgcaaccttttagaactgtctgagcgccagatgcgtgaggtccggggtaaccggatcgccatgattttccaggacccgatgacaagcttgagtcctgttcacactgttgggcgccagatcgctgaagcagtccaaattcacggccgcgtgtctcgcgccgaggccctcgaaaaggcattggagatgcttcgacttgttcgcattgccgatcccgagcgacgcctcaacaactatccgcacgaaatgtccggcggaatgcgccagcgcgccatgatcgccatggcgctcgcatgctcgcctgaacttttgattgctgatgagccgacgacggcgctcgatgtaacgattcaggcgcaaattctgcggctgatcgtcgatctgaaggaccgtatgggaacggccgtgatgttcatcacgcacgatcttggtgttgtcgctgagacctgccaacgtgtcatcgtgatgtatgccggccgcattgtggagcaggcgagcgtcactgacctgttcgctcgccccacacatccttacacgcgagccctcatgaattctgtgcccgatcggcggcgcggtcggcaatctcgccttcccgaaattccgggggttgtaccgagcctccgcgagcctcttgtcggctgcagctttgctgagcgctgcccctttgcaattggggtatgtcgcgaaaagatgcctgtcctaagcgagatacaacctggacacgctgccgcttgctggcgttcgaatgaagtggtgaacctatgagcgacgcgctgctgaaagttgagagcctgaccaagcactatcctatcgaagcgggatggttcaagacgaacgttcctgtagttcgggcagttgaggacgtgtcgttcactgtccaggcaggagaaacgctctgcgttgtcggtgaatcaggctgcgggaaatccacgcttgcgcggctcctgatgcggctcatagatccgacgagtgggcgagtgctggtggaggggaccgacatcgcaggactaagaaagaacgagctcagagcttggcgccggcggatgcagatggtgtttcaggacccgtactcctctctgaacccgcgtctcaccgcgggccagattatcaccgaaccggtcgagaacttcgaatgtctaagtagaagacagcgccaggaacttgctacggatctactccgcaaggtaggaatgtcgccggagatggcgtctcgatatccgtcggaaatgtcgggcggtcagcgccagcgcttggggattgctcgagcgctggcacttaaaccttcactcatcatcgctgacgaagccgtttcagcgcttgacgtctctgtgcaggctcaaatcctaaatctgctcatggatctccagcaagaaacagggatagccttgatttttatctcccatgaccttgcggtcgtggagcatatcggccaccgcgttgcggtcatgtacctggggcgcatcgtcgaactctcgccccgcgacgctctttttgccaagccagttcacccctacacagaggcattgattgcggccgcgccagttccagatcctgctcgcgccaggctagaggtccccttggagggagaagtgccgagccccgtcaatccaccgagcggatgcgcgtttcacccacggtgtccgctcgcggttgatcggtgtcgcgctgaagtgccgccactcgtccctatgcccgatggtcgtgcggtggcttgccacgtacgggccccggctgccgcggctcatatttcgccgagcgctctcgcgtctcttgcactgccaaaaaccgttcagcccggcggaacaattctcgcccgtcgttgaatcaaaaagctagcccagaacaccaaggaagaaatatggagaagtgctcacacgagagcggtcgtcattcggcggagaatgacggcaaatacgatatcactggttcgacggcgacgaacgtcgtggacggtttcacaatggtggcagttggcgacgttatcgtgtcgcgagccctggcgaacgggcaccatccgggctttagtgagatcgtcgagctcctgcgagccgcagacgtaactttcggcaacatggagacgctgatcttcgacatcagatcattcaatggaacaccgcaggctgagtacgggggggcgtatcacgtcagccttcccgagattggacctgatctgaaggcgatggggttcaatattatgggccgcgcaaacaaccattccttggactggggcgtcgaaggcatgcgtgagacgagccggatcctcgatgagagcggcatcatccacgccggtgtgggtgaaagtcgcgcacaagccagcgctgcacgtcttttagaaacggcccgcggtcgcgtcgctttgctctcatgcgccacctcattcacgccgatgtcgcgtgcatgcgatccagcgggcgaggcaccagccaggcctggagtcaatgcgctccgtctagagagaagcgtcgtcgtcgagcccgacatgcttgagagcctaagaaagatacgtgatgccttgcccaatcctgggcctaaacacgatgatcgcgaaatgttggtgctcgcaggaacgacctatagaaccggcaaagacgtcggctacacctatgcggctaatacgcgagatctggccgatattttaagaaacgttcggcgcggcaagcaatattccgatttctgcatttttacaaaccacgcacacgagccgggaaattggagcgaagagccggccgattttgagcaggcgcttgctcgcaagctaatcgatgcgggagcggacgcgtacgttggacacggaccgcaccgactgcgtggcatcgaaatctacaaacgccggcccatcttctatagtctggggaacttcttttatgatgacctccggacacccgttggggcggacatgtacgatgtgtacgacaaggacccacaggtggacaccgatgccgaagtaaccgcagcggaagaaacaatgggttaccctacggctgcagggttcataggcgcgctcgccgaaccggtgtattacgagagcgtcgtcgcagttagccgctttgaggagaaccaactggccgaactgcggctttatccaatcgagctcggttattccaaaaggcttgcgaacaggggcgtccctagtcttgctccacgccctcaggcaatctcgattcttgaacgcctgcagaggttgtcagagccgtttggaacgagaatcaccatcgaggaccgtgtcggtcttattcgcctctaatcgcatagacggtcgacgcgccataaggttccattaacatggctcagtagcttcattgagcctgcaaacggcggcttggcggccgtttgcgagcgcgccagctgaatacgcgcgccccgtgttcagatgatcgaaggtcaaggattgcagcattgcaagatgttctcggctgcgatggggcaaacttggtttccaggtccgtgacttcgcataatgggaacctcaatagaggtaagttcctcatctgtcgtacgccctcgactcgccacatccgtcgcggcctccgtcgcgcggatcctgatccggcgtagagggcgctcagtttgcagcattcctgcgcgcaagtgatcgaatacgcagtcaattccatttcatggtcacgtacattttaggtcgaaacaagcgcgttcgagcgcctgacaacaggaactcatcgccaaatccttcgcagcccgagaggaagcatttatgaccatcgatattaaggacatcagcgagaaggaccgcaatacggtcctgcatccgttcacacagctgaaggactttgcgaccggaaagcttcgtgagccgacgatcgtcgagacgggcaaggggatccgcatccaggacgcgcgtggtaaccagctgatcgacggctttgccggcctctattgcgtcaatgtcggctacggccgcaccgaagtcgcggaggcgatctcacgccaggcctatcgccttgcctattatcattcatatgcggcacacacgacggatgaactcgcaattctgtcggatcgcctcgtgaagatggccccgggcaagatgagcaaggtgttttacggcatgtccggttcggacgccaatgagacccaggccaagctcgtctggtactacaacaatctgcgtggcaagccgacgaagaagaagattatctcgcgcgaacgcggctatcatggctgcagcgtcgtctccggctcgatgaccggcatgagcttctatcacgatcacatggacctgccgctgccgcagatctgccacaccggcgtgccgcaccattattggggtgcaaacccgggcgagacggaacgcgagttctccgcccgtcgcgccgccgagctcgacgagatgatcgaaacactgggtcccgataatgtcggcgcctttatcgccgagcctgtgcttggtaccggcggtatcacgccgccgccggaaggctattgggaagcgatccaggccgtgttgaagaagcacgacgtgctgctgatcgccgacgaagtcatcaccggcttcggccgcaccggctccatgtttggctcgcagcattacggcatcgagcctgacctgatcaccgtcgccaagggtctgacctcggcctacttcccgctctcagcctcaatcgtcggcgagaaggtctacaaggtgctggaagacggcgccgatcgcgtcggcgccttctcccatggctatacctattccggtcatcccattggggcggccgcagcaaatgcggtgctcgacatcgtcgaaaaggaagatttgccgggcaatgcccgtgaggtcggcggctatttccaggcgcagctcaaggagaagttcgcccagctgccgatcgtcggcgaagtgcgcggtgtcggcctgatgggcgccatcgagttcgttggcgatcgtgagaacaagaagcgtttcgacccattgctgaaggtcggagctcgtgtctccaaagctgcccgcgatcgcggccttattgcccgcgccatgccgcatggcgacattctcggctttgcgccgccgctcgtcaccaccaaagaggaagtcgatgagatcgtcgccatggccgagaaggccgttcgctctgtcatggatgagttggtccgcgacggtcagaagctctgagcgatagttaagccttcggcggcggtggatgccggccgccgaaggcttgtgatcaacgactgcatgaagccggaaaggggcaggagatcacctttgcctcgcagaccaacgcgacctccggacgagaggtcatcaggaatagggaacctggctatgactcccgccaaactccacatgacgaccagcctggcgccgatcgctgttcacagcccctatgatgggtcgctgcttgggtcagttgaggcgaccgatcctgccgacatcgatcgcctcctggcaaccgcccgccggggcgccgagatctcgcgcaatctgccgcggcacaaacgagcgagcatcctcgaaggcgcagcccagatggtcgaaagccgtcacgacgcttttgccgagatcatcgttcgcgaagccggcaagaccatcgttcaggcgcggaaagaggtgctgcgctgcgtcaacacgctgaagctgtcggcggaagaagcaaagcgcaatgccggcgagatcgttcccttcgatgcctataccggctcggagcagcgccagggctggttcacccgcgacccgctcggtatcatcactgccatcacgccttacaacgacccgctgaaccttgtcgcgcacaagctcggcccggcgattgccggcggcaatgcagtgatgctgaagccatccaacctgacgccattctcggcgatcaagctggtgggcgcgctgcgggaggcgggcctgcctgaggaggtcatcaccatctcccatggcgaccgggaactggtgacagcgatgatcgctgctcgtgaggtgcgcatggtgtcctttaccggcggctttgccacgggcgaggcgatcagccgcgcggctggcctgaagaagcttgccatggagctcggcggcaatgcgcctgtgatcgtgatgaatgactgcgacttcgacaaggcagtcgaaggttgtgtctccggcgccttctgggcggccgggcagaactgcatcggcgcgcagcgcatcttgatccagtctgagctttatggccgcttccgcgatgcttttgtcgcggcgacaaagaagctcaaggcgggagatccccttcaggaggacaccgacgtcggtccgatgatctccaagcaggtggcggaacgcaccgaagccgccgtcaacgaagcgatcaaggcaggcgcgacgctgctttgcggcaactatcgcgaaggctccctttatcatccgactgttctcgaaggcacgccgctgacctgccggctgtggcacgaggaagtgtttgcgccggtggtcatgcttgcacccttcgacacgctcgataaagggatcgagatggccaacgatccggactacagcctgcatgccggtatcttcaccaacgatctcaacgtcgcactggaggcagcaaacaggatcgaggtgggcggggtgatgatcaacgactcctccgactatcgtttcgatgccatgccattcggcggcttcaaatacggcagcatgggccgtgaaggtgtgcgcttcgcctatgaagatatgactcagccaaaggtcgtctgcatcaatcgagggtgagccgtaagttccaagcggttgactgaatgcgcaagcgtacaggcgcggggcaaatgctcctcaccaccggcgtaacttgaggggagattatggataagacccacggcaagatctgcgtcgccgaggtcgaggagatcgcggcggtcggcagcctcgatcctgaccagatccacctgcctggtatttaagtgcatggccgatcaggggccagcacgaaaaacgcgtcgaacaacgcacgacgcgcgcggcggcttgagggtagggggaagaaatggcctgggggtgcgcgtgctcaacacgctgctgttcgcgacgaggcgccgatcggccaggaagcgtcttgcaacgttctgcatcgacggcggcagggcatttgccatgtgcgtggaatcgtgtgaaggaaggtgtaagtgtcatgaccggcgccgagtttcgtctctgcgatgtcgcgctcgactgctcgttcaaaacccgcgaccagcgagttgagcgcgaacaggcactcgcggtcctcgacctcctcgaggcgagtaccttcgtgcccgtcggccatcacggcggcccgtatcgcctcaagatctcgatggccgccggccggctggtatttcatatcgccgacgataagggagcgcatatcgtcagccaccatctttcgctcgcccctttccgtcggctgcttaatgactacagccgcacttgcgaaggctactacgaggccatgtgccgctccaacctcgagcggctgcaggcgatcgatatgggccgacggggcattcacgatgaggctgccgagctactgagggagcgtctctctgctaaggtcgacatcgacaaagacacagcgcgtcggctgttcacgctcatttacgcgctgctcgctcgcaactccggccatcagatccttttgaattgaatagcctgcgatcaacgcccacaagcgggggggactccccaccgtttaacaagcggatttttgagcggccagagaggggtcgaaggtggtgccagttttgagcatggcgcaggcgacggcgaggaggcggtcggcgactgatcgcagggcgcgaccgtggctgtgacctcggcttcgaagggcggcgtatttcaaacggttgtgaggtcgtgctgaacggcgacgcgcgcccaatggtacatggcgttggccagtcggtcatggcaggcctgtcttctgacgacgatgcagctcttgcccgagcgcttggtgaccggcgcgactcctgtcaagctgcgcaaggcggcgtcgtcacgtcgctgcagggcatcgaacgcttctgcgagcagcgtggcgaggacaacccttcccactcccggcaaggatgcgaggatctccacgtcatgctgcttcttctgccccggctccacctgcgcggttgcgatgaggctggcggtcaggccatccagccgatgatgcgcctgtttgagctgccggttgacgaggcggatgcgggcaatgagcgtagtgacgtgggcgctggcggattcggtcgttccggcggcgaccttgagcggcggctggcgcaatatatcgagcacatgggggggcgtcgaagcggcggatgcgatggcgcttgagaagcttggcgatcgtcgcctcgcggatgcgcgcggctttgtccggcgtcggcacggtgtcccagagatcgagcaaccactctgccccgaggtcgttttcgagctcaagcagtgcggggaagtagcgccagagctgctcgcgcatacggttcgtcaaacggttgcgctcggcgctgaggtcttcggcgatgcgcgaccactcgcgcaattcgatgacgacggggtcggagaccgcgagcagccgaaagcaacgcggatcggtgcgcagggcggaagccatcacctcggcatcgcggctgtcgtccttggcaccggccatggtgaagcggtcgcggaaacgatccatttgctttggattaatggcattcaccttgaacccgcgctcaatcagcgtctcgaccacggggccgtgcggcacctcgattgcgacctggatttcgtccccctcaaccgcgccgctcgtcgccatcagccaggccgccatttcggcgagcccttcgccgccgtgcctgaagaccctttcgccgatttttcggccatcaccgtccgtgaggaacacatgatggctctccgacgcccagtcgacgccagcataacaatgtctttgatcagtcatgccttctccccgttcgagcatacgagccaccgcgatcttcgccgatccctgtactggcgctcggaaaagcacaggtccggcgcgaactccccacggggcatcgatcacggccaatccgacggggcacgtgtcccccccaggtgctcgaggcacagggggcgatgggtcgctcccgacgaatcggctcggttcaggaaggctacgccaattcgggccgtcgcccatggtgcacgccacgttccgccacgcttcacgtcgcgcgacccacgtcgagcatccaagaaccgcatgagaagggtacagggggttggtcagcgtccatcagaaatcataggaggaagcacgacgtgcatgcaatatcacagcatccgagtcagcccggcaagacacaatctcgacgcaacgctcctcaagcggttacaggtgcgtgatgcaaacgaattctgctggctttcttgaaagcgtagacccaaaacttccgccatgccatgtcgttccttgatctaccggaggggctgccagaacggatcatccagtgcaactctccctacacggtccgcttcggtgtacggctgcgcggccgcatgtacagcttcatcggctggcgatcggtgcgcgagcactgcgaaccagtgaagggcgacattcgatatgcgtcaaatgctgacgcagaggaggtcgaggcgcttgccgcactaatgacgctcaaatgctcgcttgttgacgtgccgttcggtggctccaaaggggcactcaagatcgacccgcgaggatggaccccgcaggagctcgagcacatcactcgacgctttacgcaggagatgaacaagcgccccgatcgggccaggcgtcaatgtgtcggctccgatatcggcaccggtgagcgggaaatggcctggatgatggatgagttccgccgcgccaatcctaccgacgtggtcacttcgggtgcttgtgtcaccggtaagccgctgtcgaaaggcgggatcgccgggcgagcggagtctacgggcaggggcgttcaattcgcgatccagagctcccttcgggacacccgcacgccgggtttggatggccggcgcaatctcaaaggcgcctccactgttatacaggggtttggcaatgtcggctatcacgccgccaggtttttgtccgaagaggatgatgcacgcgtgaccgttcttgctgaacgtgacgggtatgtcgccaatccggaaggcctctccattgaggccctcaagcaacatcagatccgaacaggcagcattctcggctttgatggagccaagtccattgccggcgatatgtgcggcgtcgaacagccctgcgacgttctgattccagcggcgatggaaaatgctattcatgctgaaaacgcggagcgcatgaaggcacatctcgtcgtcgaagccgccaacggacctgtcaccttcgaagcggacgagatccttcgctcccgcggcgtgaccattcttcccgatctttatgttaatgccggaggtgtcgtcgtcagttacttcgagcgggtgaagaacctcacgcacatccccttcgggctcatggagcggcggcggcgggaacggggcaaccacacaatcgctacggcgcttgaacggatgacaggcaaggagtcccccgcagacatgcgcgacgaattcctcgaaggcggcgccgaaatcgacctcgttcgttccggcctggaagacgtcatgcgcagcacctggacgcgcattgccgacctgatggaacagcaaccggaactcggtgactacagaactgccgcctatgtcgcgtctatccggcaggtcgctgatttatgaggcgattgggatatgaccgcgtatggcgaaaacagcgtgcggcgctaccgactacgcttactctcacgcatggctccactcccggcgatgcatgcccaagtggcgagtatcatcgggggatatcgcacctcttcttcgatgggagcgaactctacggccatcacagtcgagcgcagagaacatgtgtctggaggcaaagtggcttcagcgctacggcggggggtcaattcttcgattcgcttgacaaaacccacgagaactggatggaggccaaccgatacatcgacatggacgatctcagagagcacaagaagctggctctccgcaacgccgcatgaccagccccatcgccgccccaatttgctgaacttgacgcacagaacctcattttgacaaggcgagcttcgggggtgctggtgcttctagggctcggcgcattggtttcgttcccgagttgccggccagttgtccgatagcttgggtgccgcgcgggtcggccgaacgatcgctatccttcctggtttcgatcgccttttttgggcttgcgccgacaataccgctgctggcgatcgcgctttggcatgtgtcatggttcgatggacatggcgatgaacagatgggtgcggattccgacgatcgcgcgcatgcattccaatctgatgccgcgcaccgttccgatttgatcgcgcgcatgtgaggcgaccaatcgttgggggttaaatgggactacgaacttatcctggtcaagctggcgccgatgagatcgctgtggacggctgaagactgcctccaacggagcgaagcagtccggcgccgcgcttcccaacgcgccgtaggggccggtctgcttcgcgggcggcgtgtccgacattcttttggccaggatattgtccacgggtttggggtccggcctttcaggtctggatttcggccggttgacgcagccgacgcatcgattcgccgctcatttcaagcctgtgagcgttgtgaaccaggcgatccaatattgcgtcggcataggtggggtcgctgattttttcgtgccatcgggctacggggaattggctggtgacgagcgtcgagcgtcggccgtatcgtccctcaaggatctcgagcagataatggggagcattaccgtcgatgggctgaagcccgtaatcatcgaggatgagaagttcgacggcgccgagacttttcaggcgcgttgcgaggctgccgataccgcgggcctgttccaggctctgcagcaatgccggcatccggacgtaaaggaccgaatgattgtcgcggcaggccttgtgtcccaaggcacaggccaaccagcttttcccgatgccggtcgggccgacaatggcacagttctcgtgttttctgatccagtcgccggcaatcagcaggtcgaggatggtgcgatcgtattcgcgcggtgcacggcgaatgatatcttcgggaacagcgggatggtgcagtttcgcgttacgaagtcggagcgcaagacgcttgttgttgcgccaggtggcttcctgatccaagagcagcgccagccattcgccatgactgaggttgtcgctctcgtcattatcggccagtcttgtgaaggcgtctgccataccggcaagccccaattgctgcagcaggttgagggtaggatgtttgagcatttttattcctttcaatggtagtattcggagccgcggaggttggaatgctggatcggttcctgctcgaggcgctcggaccttgggaggcggtcgagttccttttcgagaatggatttgatgccgggatagttgagcacctggaattccagcgcgcgctgcgcagccgcttcaaggcgatcgacgccaaaccgtctttccaggccgatgatgccgacacaggcacggtatccctgttcgggatgcgcgcgcttctcaatgatccgatcgacgagaacgcgcagcatcggcccgatccgcttggcctcgctgcggatcttcgccggcgtccattcgcgataacgctgatggtttggcggcatatgcaccgcaaccgtcgtgtggcggccgttgctgctgccacgcacatgcgcggcaattcggtcgccgccgaggaatatttccaccgtgcgaatggtgtatcgaacctcgacttcgctacgcgcaaagcggtaagggacggaataaaaatgccgactgagttcaatatgataatcgatgccaacacgacaccgacgccattccgcatgcacccagggctcggcaggtagcggcttcagattcggggcatcaagttcgtcaaacaacgcgcgccgcgtcttgccgtactggcgtatcacccgttcgtcattgagccgggtgatcagatcggcaatggccttgttgagatcagcgaggctataaaaggtccggttccgcagccgacccagaagccaacgctctacgattccgacgcaattttcgacttttgccttgtccctcggttttctcgggcgtgctggaaaaactgccgtgctgtaatggcgcgccatatccgtataggaacgattgaccatcggatcgaagtgacaagccttgatcaccgcgcatttggtgttgtcgctgaccaggagttgcgtcaccccaccaaaaaaccggtaggctgcgttgtgcgcctcgatccagtcgggcaactgttcgctccacgtcgccagcgcgaacgacaggctggacgcccccatcaccgccacgaagatatgtgcgtcccgcaccacgccggttttgcggtcgacgactgccaccttgtcaccggcataatcgacaaacagcttctcgccgccggcatggctttgccgcatcaccagaggcagccggccatgccagtttcggaacaactcacagtatctcgaatatcggaacccgtctggatcccgagcaatgtactcctcccagagcacctgcaacgtcacatgcttgcgcttcaattcgcgcgcgacggcagaccagtcgggctcggactgcttccgacgcccagctttcttaccgggcgtcccgtaaaggcgctgctccagctcgcggtcactgatcgtatccggtaaaggccatgtcagtccttcccggtgcaatcgctttaacgtgtcgcggaccgaagtctccccgacgcccagttgcttggcaatgatgcggttcgaaagaccgacatccagccgcagtttcaaaatctcgcgcacctggcgcatcaggagtctcctcgtcggcaattcacttctccatggcgttgcttccacctggagaaataaccccaacgatcgggcctcacgatatcgacttactgcgcgcgattatctcggaatgctgcgcggagaattgtcggaatggtgcgcgtcatcatctcggaacggtgcgcgcgatcaaatcggaatggtgcgcgcgatgagcccggattccgcacagatgggcgagcgaggtggagaaacacatgaggcggtcagtgatgtcgtcgtttcaggccatgtggagtgtgggggctgttctgggcgcagcaaacaggccccagtatacattcatttccttgttactgccgtgatgaccggcgggatcctcggacccttccttctgctcgattggcgatcaactatccagacattcatagaaataccgctggaccgttgagcagggcggaaagtcctttggcaacatccgccattggcagcccgttgaggcgatatagcagcgcgttcacaacctcgcgcaaatcggtcttgcgcgggcggccgagacggcgcggcgcaggcacgaacggtgcaatatattcccattcgcgatccgtgacatcgcttgcatatcagctcgtccgacggatataattccgccgggtggtttcagtccaagccatcgtaggctccatcgaatcttcgcaaatccgacggaatcacaactgactgaaatcactcaattctttttgggcagcctcttagacctcaattccccacgtcacaggatacttgcctttgcagcaggcatggtgggttccttcgttagcgggttgggcaggctcccgcgggatcgactgcgcggacgggatctcaggtggtttttcgaccggcaggcgcactgcggcaggtcggtatgcttgcgaatcacgcatcggcggcaaaggggaacggatgctccaagtcaagatggcaacaaggcatcaagcagatcggaggcaacagtgctgttggaggcattcgagggcacaggttcatccacgccgggtcaacccacgtttggctggctcggaagccagtgttgtattcatgaggtttcttttcgcgcggcatcattcacgatcttccttgcctccacggttacgggtaggctggtgtcttccggaaggtcgggcagtaagagccgccagccatttctgagcaccacaaagccgccccacaggctttcattctcaaccttgacaatcggctcttcgatatctttcttgggaacatacgctgacaagccgctgccgcttctgcggatcgttaccctcatctggcttttccttcgttgacacccctggcgcattcagtggtttttggcgttgaggtccccccgaggctcctcagttcacgcgtacgcattccaacgacgatgccgcgatcaatccattcgacggcataaatgtagaactgctggagaaatgtccctacatcgcgcacaaaacccgcgtcgcctttcctgacgaggcgttctccgatttccttcccgggataggtgccgtcattttttatgtggcgtgtggcacaaactctctcacccggcataaatcgtggaggattgtggatttcgacttcctcttcgcgtccaatactcattaccattcctcttgtggttgcgattaccagggggagactcaaggtccggccgcgcacggaagcccggctatggcattcggggcttaagccggcacgcaggtcttcggcatgggacatacagaggcgcattgctgtatctcgaaaacgcccttgcattcggtgcatttcttcggatctatcacgtacttttcgccctttaactcgatagcgttggaagggcattcgaactcgcaggcgccgcactgggtgcactgggatgcgatgattttgaaggccatattattcagctcctggttaggtctcgatcgatgggccaagctcaagccgttgcctgcgatggggcggtaccaaactctgtcgcgtgaagagcgctgatcgcggcctcgatgtagtcatagccataggtgtccgttgcccggatcccagcttccatgagcctctccttcggacaatctcctatccttgcgcagagcacgatgtctatgccgtcgagtgcagcgatgatgccagcgagggcggcgtcctcgccccagccgccatggcaatacggctcgaccttgcggtgccccacgaatttaatccctgtttgcgaggcttcgtaaacctggaactccttcgcatggccgaagtgttcattgatgcgtccgccgcctttcgttgcgacagccacctgaagcgatccacggatgttcgcagatgcgaccgttgcgatcgctttctccttagcctctaaatggtcatcgcgtatgcgtgcgaccacctcccggtaggcctgacgcttggcaccgtcgtaatggggttcgagcggaacgtggtcgagcgtgaactcctggccacggtcagtgccgagaaggccgactgcatcggcacggcactgtcgacagtgacgcatcagcttggcaccgccttcaagacggtcgtgaagcgccttcagttcgagcgcatttgggccgcgctgtccggtcaggccaaaggaggttccgtgtgccgggtctgaaatcagcggcatgacattgtgcagaaacgcgccgcgctccttgacccatttgttgacctcgatcaggtgcaggtcattgacgccggggatcataaccgaattgatcttggtgaggatgccgcgtgcggtcagcatctcaagtcccaacatctgctgctcatgcaggattttggcagcatccacgccggtgtagcggcgatgcccataaaagatccacgggtagatcttctcgccgacggcggggtcgaccatgttgatggtgattgtcacgtggctgacgttcatttccgccaacttgtcgacatgctccggtagagcaagtccattggtggaaatgcacagcttgatgtccggaatctcgctggcgacgcgttcgaaagtcgcccttgtcttgttccagtcgtagcaagcatcgcccgggcccgcgatgccgagaactgaaagctgcggcacttcgttggcgaccgcaaccaccttgcgcagcgcctggtcgggtgtcagcttttcggatacgacgccaggccgactttcgttggcgcagtcatatttgcgattgcagtaattgcattggatgttgcaggctggtgcgactgcgacgtgcatacgggcgaaatagtggtgcgcttcctctgaaaagcaagggtgatccttgatcttctcccaggtggcagaatccatgtcggttggccttgaggacgagccgcaggacgaggacgcgcaaccaccggattttgcggttgtcagcaactgcccagaggatgtcgtgttcgtcaggctttcaagcgaaattatcggtgcactcatcaaacggctccactggagtaaaaagtcgtcgtccaaaaaagcaagcgctgtgccaacaggataatatcgaaatatcaatagtttggcgcttcgtgttcgatttgaaccaatagcccccgacgcagttttgtcgaattcgcgacagaagcggccaaattggacgatacacccgcgcgcctgaggaggaggggaatggccgagcccagataagagggctcaccgtctctagatttttttcacctgtatatgatgccgccgtaaagcatagccgacttgccgcggtgtgaggccgaggatccgagctgccttcgcctgaacccagccggccttctccatcgcgctgattagcagctcgcggtccgatagatgtggtgccaccgttaagccgccagggccggcggggtaaccgagactggccggcgattcgactggcaaacgtttgctcatggccaatccattgagcgaatggctgccaagcggtctgtcagcagttttcccgagcattgaagaaaagcactggtcattctggcaggagaaatctgatggaacaatcgtcgccgaacgtgcgagagtggcggtcctgcggacgcagttttcaagctctcggacgttgccgggaaatttgcatcttgacaggatctcgagtgccgcaggcgtgaattcgagattgcgattgttttccctgttgaaccggtcgaggaaaaccttcgcaaggcgtggaatatctccatttcgctccctgagaggcggtaaaaagagaggcactacattgatgcgataataaaggtcagcccggaactccccctccgccaccgccgtctccaggtccttgttggtggcgcatatgagtcggacgtccaccttgagcgtttttgtgccgccaactcgctcaagctcaccttcctgcaagacgcgcaacagtttcgcttgaaaggccggcgagatctcgccgatttcgtcgagcaacagcgtcccgccatccgccagttcgaaacggcctgcgcgctgagagatggcccccgtaaaggcgcccttctcatgcccaaacagttccgattccaggacgcctgcagacagtgccgcgcaattcaacttcacaaacggcttttttctgcgaggtgaaagctcgtggattgcctttgcaaagaattccttgcctgtgccgctttcgcccctgagaagcaccgcagagttggtttgtgcaacgactttgacgctttcaaccacttgcctgagtgcggggctttccccgacaatccagtcgattctcgtaggccgttgtcgggttggttcaggcagttccttgtcgcctccactaatcttgcgatcgccctcctcgccgatcggtcgactatcgcggctctcgtggccattcagccgaaccgctcgtgccgcaaggttggcgaccatcgacaggaaacgcacctcttcctcaaattgtgttctggtggctgcgccatccttggcgcggtcgatccataatgttccaagcgtttcttgatcggccttcatcgggacaccaatgaaggtgacttggccagtgccgctcacgatactctgaagctcatcctggaacagttccgacttgcaagtgtccggtacgaccagcggcgcaccttttgcgacgattctatctattgcagccttcgcagcaatgtggcgcgcgcctgatgatggaggctcaaccccgaacgtcgcagttgtctcgggctctccttcagcgccaacaacgacgattgcgccgcgccgcattggcaaaagtgcggggagggtgttaatcacattggcaagcttgatctcgaggctggctgaagtgatcaaaaccttcgatatccgatagagaccgctgcaccccaagtcccgtttgtgcatggttttaggggataattcagtcatacactcatcgagccaattcttacgaggaaacaccttgagcgtcgtacgaacggcccttggctccctacgagaaaatgccgccttgctgacattatcaagtgcttgcgcttgcacctgtgagcgcccgtcaacgtacccatcttgttagacaaaagtgagatgcaagtcatccgaatttaaagagcacaccgaatccacctcgcggatagctccaatcaatgtcaccgctctcttcgcacagtactctacatgtcccgcattccatgcatccatccgcaataacctctacttggccgtcttcattcacctcgtagcatttcgctgggcaaacaacggtcagcgcaagcaggtttgggctcggagactgatgctgccgcaccttgatgtgcggccgccccgcgtccaccaggtaacggttttggtaaagcttgtcttcaatgcgaacgactgaagctgtcatctcaatgctcccctttagcgccatgccagtgccaagcggactgcgtcgctgaccagtccccatcgcgaacgcgctttaataagagcggccgtggtcgctctttccttctcgatcttgggtgtgccgtcgacgcgcacgaagttttgcgccgcctgcgacatcaactgcggataagtcgtgaagaaattgtgtgaattcgtgtggagcagagcgggcatgtccttgtactttctgaggtctttcagaacgaaagacttgtccagcatggccttgtaaagtgagagattgtcactcgtcatcgggtgttttcggctcttgattgcggcgatcgcctcgccggcgatgcggcccgacgtcatggcgaggttcgagccctcgcggtgcacggcgttgttgagctgcgccgcgtcgccaaccacgacccagccatcgccaaagagctgcggaattgccttgaatccgccctccggaatgaggtgcgccgcatattccttaatctccgagcccgcaagtagcggccggattgatgggtggttcttgaatgcgtcaagtagcgcgtaaggactttccagggtcgctgcgaaatgggagacaaggcagccgatgccaagagagatcgattccttgttggtgtagaggaatcccaagccggccattccgcgcgagattgtccctgccgcctcaataacacagccttgatcgccggtaaggccgaagcgttcattgatgacctcttccggtaggaaatgcatttccttgacagcgagtgccacggcttcgggtttcggcaccttgcgaaatcgtgctctcgtgccgaggaggccgtttacgccttcggcgagcacgaccacgtccgcatggatgaccccgcccgctcgatcggtatggacgcctatcaccttgccggcagcatcaagagccagttccgtcaccgtcgtctcgcacaaaactatcgcgcccgccgctcggactttccgcgaaaaccacttgtcgaactgggcgcgaatgatcgtgtaacggtttggcgccggctcattgaagtcgtccgaccggtagtgcattccggtgtgtgacgtgtcgtccgttacccagaatcgctgctcgaccagatgccgctcaagaggtgcatcatcccggaaatcgggaatgattgtctccagcatgttggcgtacaagatggcgccttggacgttcttggagcccggatattctccgcgctccaactgcaacacttttagaccgcgacttgccatggtgtatgcagccgcgtttccagacataccggcaccgacgacgatggcgtcgaatctttcttcggtcataggttttacctcagttcacaactctcagacgattggccggcgccaaccgtttggtgaaagcttccgtcaacgccggcagaaagctgacagcatcggtgacaacaccgacatgggcgaaatcgaagatgggcgcgtgtggatcggtgttgatagcgacaatcaggtcagctccctcgacaccgacgcggtgctggaccgcgcctgatattccagccgctatatagagcttcgggcggatcgttttgccagtttggccgatctgccgatcagctggcatccagcccttttggacgagcggcctggaacagccgtagtcaccgccgatcgtcagcgcgaggtctttgataagcagcaggttctctgcattgctgaggcccagcccgccggcaaccaccacatccgcataggcgagattggcgttgcccgatcggtcgtcggaaaggaaaccgacgaccttcgtgacgatatcttcctccaacatccgccaatcgtgccggattacccgcccgatcggcttgtttgaccgctgtggcatgcgcatgacccttggccgcacagttgccatttggggccggcaattgagcgtataaatcgtgcaaagcaacgagccaccgaacgtgggccgagtagctgcaagcgaaccgtcctcgtcgacatcaagtccggtgcagtcggctgtgagccccgtcagcagtgtggtcgccacggaaccggcgaggtcgcgacccagcgtcgtcgcaccgagaagcagaatctcaggcttatgggtaatgaccagatctgtcagtgctttggtgaaaggctcgtttctataatccgtgagcagcggctcctcgacgagatacaccagatccgcaccataggcgaaggcctcagcagcggcgtgcaaggtagaatcccccggaggcccgagaataatacctgcgagctgaacccccagttggtcggcaagtctgcggccttcgccgagaagttcgaacgagaccgggtggacatggccgcgttccagctccatgaaaacccagacgtgccggtagtctctgaattgctcaggcaggtcctttttcatgctggcacgggcttgggccggtggtgatgctttactttttcgagttcccataatctgctcctatctgctcacgctacgagtggaggagagctcgtgctccagtgccggctgatgggcgaagattgaagtgaccagttcgttagctacgtcctgcattgccttctcgacggtgtcgatctgcaccgctttttgctcgcgcggggtaggggcaaagacccgcttgacgaccgtcggcgaaccgcgcagcccgcattttgtgatgtcttcaatgccagcctccaccgcattccacttgacgatttcgctgcgcgcggcccgcaaggcatcatcaagtgagccgcggcgaatggcattcgatccttccagcatggtgatcaggcaaggcaattcgctcttcaggacgtgcgtcccgccttccgcgcgacgctcgaccgtaatcgcgcgcgtgcggagatcaatggaagtgacctttgcgacataggtcaactgcacgaggtcgaggcgcttggctattccggggccgacctgggcggtatcgccgtcgatcgtctgcttgcctgtgaagacgatatcaggcgatccaaagctattgccaatcttcgcgattgcctgagaaagagcaaatgaagtcgccagcgtgtcggagccggcaaagtgccggtcggtcaggagtatcgcgcggtctgcgccataagtgagcgccttgcgtaaagattcttcggccatgggggggcccatggtgagcaccgtgacctcgccgccatggtggtcacgcacttggagtgcctgttcgagggcaaacaggtcgtaagggttgatgatagtcggcacgccttggcgcatgatcgtgttcgtcaccggatggacgcgtatctgcgccgaatccgggacttgcttgatacagactacgatgtgcatgaggtctctttagctccgatcgcgtgtaaaatgacgtctttcgcctcccttccaagcaccaaccatgccaaccaactgtggtccaagaagcccatgaattctaaggagctttttcggctcacaggatgcgacctgcgtgatagcgttgtcggcttcatgacatcgaatcgtcgcaaccgctccgtacttgtcgttttccgatgatcttaggccgagtcccaatgacaaatgtgcggttaggcgcaccgctgatccgacgtgaaaacggcgaagtggttgcaaactccgcgctttatgtaaagtgccccgaagctcttcggcccatggcacttgtgcgcggaaagcgacagcatgaagtgtcttgctgatccttctcgtggatgacctagcattctcgttcccctctgtttctgcgatcagccgaaagacttcccgcaggcgcagttctctcgtgcgttggggttatcaaagatgaatccggcggaatcgacacccgtggtgaagtccacggtcatgccgctgacatgaggttgagaggctgagtctacgtacaccttgaccccacccgcctcaatgacagcgtcgccgtcgcgcgactcgctgtccaagcccaggtggtatttaaaacccgagcagccgcccgcttccactttgatgcgtagcccatccgccggctcgcaagtctgtgaaagcgcgaactttattgcggcaatcgcactgtcggtgagcgttatcatgggttcgtttctcctggtttcgagtcgcttgcgaacgatgcacctagtgtgccaaccagaaaccatcacgaaaacaacgcgttgttcaaacacggccatgtcgtttgtacgacacagtcgtagttacgacattttgggtgattaaaccgagttcgtgtgaggctctccgcgacgcgccgagcatcgacgtttatcctcggcaggggctgctgagactccggcgcggagattggatacccggtcgattgaaggaaactaaaccctcagcgggaatgtgccgtaccgttccgtgccgcagcatgaactgctccggcgcaataccttcatgtcggtgtacataggccaaatgctcctcttgcgaacgcgagttcgatcacgacatcaattgtgatgacagacttgctcatgggaactcgcctttaacttcggttccgtgcccgaagagcggcatagcaggaagcaggatctcggtgaaatcgattatctcgatggcacgcattagctcaatggatcgagggatcgtccgcggagcggaccggcaagtcaccttgagcggcgattttcctgctgcgcggggttcatgaaagtgcgctggaggctgctcagtgggtagctgcggcgctcactgtcagcaccggctccgcaacatcagactggatagctcacatggcaaaaatcaaaatttaatcgggacacgaccgagacgtgcggtgtcgaaagtcctcagcgtttcaagaatgttctgcggagaagatgcccaataaggatccgactcgcagttgtccgagaaaccttcttcttcgaaccattgctccaccacgctatcattgaccacggcagcgtagcgccacgagcgcattccgaagccgagattgtcctttgcaaccagcatgcccatcttgcgagtgaattcgcccgaaccatccgggataagcctgaccttctctaagcccaacgccttgccccatgcgttcatgacgaaggcgtcattaactgacaggcagtagaccgcttcgattcctaccttcccgaattcgtcgtaaagtctctcaaagtcaggcaattgctgagttgagcaggtcggggtgaacgcaccgggaagcgaaaacagaacgacgcgcttgccactgaagtaatcctcggttgtcctgacttcccatcggtatgggtttggccctcctattgtctcgtcgcgaacacgcgtgcgaaaggcaacgaaagggactctttttttcacaggcattgaacatcgctccttcaaaaaagaactgagcattcgccgcctctggaccctctggcgaagcaccgttacttaaataatcagttcgtcggccaacgaacagacagcaagcggcgtgccactttagatccaagcttcaacagcactgcttttggtacgggcatggcaatcttgtgcgcggactggcgcaccttctcgtgcgtttccggttaagaaactcgaccgctgctcttgtcagagagccgacatcatgtcgcctttgtcgtccttccgacacgccgcatttccccctgcttcctacagacctccgtttagcctttgaatggaacgcacgaacttaacccttcggctcagcagactggattggcacgaattttgaaacgcccccggggggcacaattgccgtgcaggcatctctggggcgccctcgtgtggaacgaaagcagggaaggatgggaacatgtcaaatctagctcaggtgcgcgctttgtcgaaagggagagtaacactcggaatcagaatgaccgatcggcccggttggcgacagttatccgaattgctggacctcggaccctggccgcctacggacctcgaaatggatttcgatcagtacgtgtttgcatgtgtcctttcgcgtgcactcgaggaaatcgatgccggcgaggcaactgcaacagaggcaactggtctttcgcaagtagagctgcgggacatcctcaaccgcagttttcccgccccaactattcatgtttttcgcttggaagaggtgagagattcggagcccggccccgaggaggcacttctgcgcggtctgctgctcgcgcatgctcgagcgggcgattcggcgagcgtgctgttcgccaaaatcatagcccggcgtgccttgcgccacgaccatctctggagggagcttggtctttttgatcgagtcgaactcagccgattgctcgccagccatttcccaacgcttgcagccggcaatacccaaaacatgcggtggaagaagtacttttatcgcaagctgtgtgaggccgagggctattcgctgtgcacggcgccttcttgcccgcaatgcaaggaattggagagctgctttggctctggggaaggcgaaagtgcttcaccagtcgggaaagttggcggagaggcttgagctcaagcgccgcctaggtcggctatagacggctgggaggccttttcgtcatctctgcatgcgcggattacgagtgtgcatgcaccaagtggaggaaatcatcttgatcgtagaaaacttggcggaggtccgcggcaagacaccccattatagacatctatacgtccaggtcctcgcggcgatcgccgtgggcatcctgctcgggtatttctatccggatgtcggctccaagatgaagccgctcggcgacgccttcatcatgctcgtcaagatgatcatcgcgccggtgatcttcctgacggtcgcgaccggcattgccggcatgaccgatctcgccaaggtaggccgtgtcgccggcaaggcgatgatctacttcctgaccttttccaccctcgcgctcctcgtcggcctcgtggtcgccaatgtcgtgcagccgggtgccggcatgcacatcgacccggcttcgctcgatgcaaaggcgatcgccacctatgcggaaaaggcgcatgagcagtcggtcaccggcttcctcatgaacatcatcccgacgacgcttgtcggcgcctttgccgagggcgacatcctccaggtgctgttcatctcggtgctgttcggcatctcgctcgcgatcgtcggcaagaaggccgaggccgtcgtcgatttcctgcacgcgctgacgttgccgatcttccggctggtggcaatcctgatgaaggccgccccgatcggcgccttcggtgctatggcgttcaccatcggcaagtacggcgtggcatccattgccaatctcgcgatgctgatcggcaccttctatctcacctcgttcctgttcgtcttcatggtgctcggcgcggtcgcacgctacaacggcttctcgatcgtcgcgctcatccgctacatcaaggaagaactgctgctcgtgctcgggacgtcctcctcggaagcggcgctcccggggctgatgaacaagatggagaaggcaggctgcaagcgctcggtcgtcggcctcgtcattccgaccggctactccttcaacctggacggcaccaacatctacatgacgctcgcggcgctgttcatcgcccaggcgaccgatacgccaatctcctacggcgatcagatcctgctgctcctcatcgccatgctgagttcgaagggggcagctggcatcaccggcgctggcttcatcacgcttgccgcaaccctctccgcggttccctccgtgccggtcgccggcatggcgctgatcctcggcatcgaccgcttcatgtccgagtgccgggcaattaccaacataatcggcaatgcggtcgcaacgattgtggtggcgaagtgggaaggcgagcttgccccggcgcagcttgcaaccacccttgcaggcaaggcgccggtggagaccatgtcggggttgtcaagccagcggagtgacactgttgaactcggacaaaaagtgctgtttggtgcaaccaattccgcagatcgtactcttgccggtcgcccaggggggcgcgattcccgtcgaattgctcccgatcattccgctcaggtcttcggcggtccgctaagcttatgagtgacttaaggagaaagcgagtgaagaccaaccccatcccggatcatgttccgcccgcactcgtgcggcacttcagtctcttcacgtcgcctggcatggcgccgacgcctaacggggatccgcacgccgccgtggcttgcgttcatgatgatggcccgccgatcttttactctccttccaacacgcgcgatggacgaggtacctgggtgataacacgggcgagagaccagcgccgggtccttgaggatacagagaccttttccagccatcgcagcatcttcgcctcggcacttggcgaacactggccggtcatccccctcgaattggaccccccggcccatggagtgtttcgtgcactgctaaatcctctgttctcatccaggcgggtgttggcgctggagccgactatccatgccagagcaggcgcgctgatcgactgcattgcgaaagagaagaccagctgtgacgtgatgaaggatttcgccttgccctttacgttcagcgttttcctcagctttctgggactttcccagaggcgatccgaagtacttgtcggctgggtaagcgatttgctccacggcaacgcagaaaagcgaagggcagcagcccgctcggtcgtggcctttattgacgaaatggcagcgatgcgccgcaagtcgccagctgtcgatttcatgaccttcgtcgttcaggcgaaaatcgagggccgctccttaacagaagaggaagtccgcggcatcggtgtgcttttcttggtcgcggggctcgacacggttgccgccgccattggctttgacatggcctatcttgcacgcaatccaaagcaccaggagttgttgcgaaacgaaccggctcggctcgggctcgccgctgaggaactgctgcgcgcctattcaaccgttcagataatccgcgtggccacgaaggacatcgagttcgaaggcgtgcctatccgtgagggtgattatgtttcctgtcccgcgatgattgctaatcgagatccgtctgaatttaagtgccccaacactatcgatctggcacgacaggataaccagcacaccgcctttggctatggaccacacctttgccacggagcgcatctcgcacggcgagaaatcgtcattggcctacgtgaatggttagcgcgcatcccagctttccgcatcaaggaaggtacggcgccgataactcatggcggccatgtattcgggatcagtaatatcatcctaacttgggcctgattggacgggcgaggcggtagcaatgaagcgccgatcgctcccaggtcttcatcgcttaccgcatctcaccgcaccatgatgaatgaagaaagcataaccaatctattcgaccgagaagcaatccgcgactgtctccatcgctactgtcgagggatcgaccgggcagacgaggctgcactgcgcagctgttattggcccgatgcgcgtgacaatcacggaagctactccggctctgccgcagggtttattcagcatgcactcaacgtcttcaaaactaagccgcgcaacatccaccagcttacgaacataatcattgagttcctgggcgcgacagaggccgccgtcgagagttatttcaccgcgctgcagcgcggtcacgacgcaacaggcgagataaagcaggtgctcttgtgcggccgctactgtgatctgtttcagaaaagggaaggggagtggcgcatcgtcgaacggacggtggtctatgattgggttgagaaacagagaccaccgaagtcctcggaagcagagcggttcggtcctcgccaaccgattggggcaccgcatccgaatgatcccgtttacgaactttcgaagcggcgagttgctgcgaaaaatcatccaaaggacctgatcggcagtggagaagaagaaccatgatacgactgcgctaccctccgattcctcgaggccgagcccgcggagcaaagagacgcatggacgatcgccaggttcagccagggcgggtcatcgtcgtcacaggtgccgcagggggtatcggccgcgcgctcgtcgatatttttgccgcgaatggagatgtcgttgtcgcggtggacctcccggacagcggcgtaatcgaacttggccaaaatctcggagagccccatcttggcctcgaggttgacgtgtcgcgagaggacgatgtcgtcgcattgcgtgcccttctggaaaagcgattctcgcggattgaagtgctcgtcaataatgcggggattgggccgaccatggctgcgaccgccgatactgctctcgaagattttcaacgcgctctagcgataaaccttgtcggggcttattcggtggcgtgcgaaaccgcgaagctgatgaaacctggcgccgccatcgtcaatgtcgcttcgctggctgggctgctcggcaatccgaagcgcagtgcctacgcagcttcgaaagcaggtctgatctcaatcacgaaatcgctggcgtgccgatgggcatcgcgcggcatccgtgtgacagcggtagcgcccggtcacgtgcgcacgcctatggttgccgaattggaacgcgctggcaagctcgacgtcagcgcgataaggcgccgcgtaccgttgggccgaatagcgcgccccgacgaaatcgcgcgggccgtgcgctttttggcgagcgcacaggcgagctacataaccgggtcgacgcttgtggtcgatgggggctggatgtcagtcaaccaaccgggtggtgcccatcaggctcaggataggacgcccggagcagaattcatgcggccggtcgaggacaccgatgcgcgaacagtgatcgtcatgggcggcgctacaggggtaggcgcggccatcgctcggcgctttgccgaaaacggcgacacggttgtgatcgccgacggagacggtgaagaagcggtaaagctcgccggcttgctcggcgacaagcacctgtcaaggcgcgtggacaggaccgtcgaaaccgaggtagtctcgctcttcgaagaattgcgggagcgcttcggccacctcgacgtcttcgtcaacggcatgaatgagatactcgtccccaataccgaggagtcgccggaagtcctcaaacgcatactggatgtcaatcttactggcgccttcacctgcgttcgcgaggccgccatatcgatgcgctctggcagcgtaatcctgaatctcggggcaagtttaagcctttcaccgctcgcgccaagtcacgcctatggcgcatacaatgctggcatagacatgctgacccgctgcacggcggccgaactcgggccattgggcatccgcacagccacagtcgctccaggttacatccgcacatgtgccgccaaccggctggcagcggtcgccggcatggattcggcttcgctccgacagcgaattcctttgggcagggtcggggacgcagaagaagtcgccgaggctgcctactttctggcctcgtttgatgcctcctacatcaacggctcgatcctgcacgtggacggaggcttgatctcgtccagagaagcggggtggggcagcgaagtcgatggagcaatttcggcggagatgaggccgcagcgccgacccgcggcgcgatggcggttgctctctccctgaattgcatttgcacgcttttagcgcttggcgctctgaatgcgttaggaggccatgagcagggccatagggaaaccttctcgtcaatcgaggcgcgacccgcgactgcgcgattccagatccgaaaacaaggagacaccatggagttcgcaacgttcattctcgctgcccagcgcggctatcatcagtcttccgctagcgtcatccgcaactcgatagagcaggcaattctttcggagcaggctggcttcagcacagcctggttcgccgagcaccactttaacaactacagtctcgtcccgtcgccactactgatggtagcccactgtgccggattgaccagcaccattcgcctcggaaccgcagtctgcgtgctgccgctctaccaaccacagcgcctgctggcggaaatcggctttgtcgacgtcgttgccaacggtcgactcgaactcggcgttggttcgggataccagcagttcgagttcgaccgcttcggcgtcaatatagatgaggcgccggccatcttttcggaatgcctggacattttgctgaagggactaaagcaaaaaatcttcacccacagcggtcgctacatgcagatacccccgacggcgatttcggtgcgcaccctccaaaagccgacgccaccgatctggattgctaccgcatcctccaaaactatggcccgagcctatcgtgagggtcacaatcttttcgtcacggctctccatgacggcttggaaactctgggcttgctgcgtggcatcattaagaccgccgctggatccgagggcaaggaggttcgcgactccaaggtatcgctactgcggtgctgctatgccagtgatgatggagcggaaatcaacagctatatcgataacgcccgcttccagcgccggctgtccgaggcactgcaacagcgtcggcaacaaagtaaggacggctatatgttggaggagatgccgacgcatcaggatctatcgttcgatactatgcgcaagaacctgcccattggcagcatcaatcgcgtgattgatcgccttctggaggagatcgatgtcttgaagccggaccagattgcaattcagacccagctgggggattttgaccaaaagacgatgttgcgccagatcgagctttggggagacaagataatcccggcagtccagaaatctctcgggcggtcggaggcttgagtttatatcgtcctgaccttcgggtcagctcacttcctcaggcgccgtcagaatgcccggcaagttttaagagccatcgtaaatgtcggcacagattacagctgaactcctcgtgaaagttgggcgtcatgggccgcatacccattcgcacgacagacaagcagcctaccggcggccgtacgcatttgagctccgatagttcagtccgcgattttaatcggacgaggccctgaaatacccatcttaagttgatcggacggcggacacttagtgctggcaaagcctccgagaagatgcttcccaaacccgcggcttgtacctgatcggcggcagtgggctccgagcgcctgataggcaacgctatgcgacaattgctgggtacaattgtcggctccgcgacacatgcttgcgttttaatgcgggcgctctctttttggtctaagcggctgagaaatctggaaaatcgggcagccaaccgctgcgctccaccgacttggcacggcttttgaagccttccttgtgcaggcggcttgaagctgccgctgtattcgtgttgcgggcaaccgcgatggtttcgaacaacgaaggaaagcaacatggcaggtctgcgtcaaatcgcgttttacggcaagggcggtatcggcaagtcgaccacctcgcagaacacgctcgccgcccttgtcgacctcgggcagaagatcctcatcgtcggctgcgatcccaaggccgactccacccggctcatcctcaacgcgaaggcgcaggacacggtcctgcatctggcggcaaaggagggatcggtggaagacctcgaggtcgaggacgtgctcaaggtcggctacaagggcatcaaatgcgtcgagtccggcggccccgaaccgggtgtcggctgcgccggccgcggcgtcatcacctcgatcaacttcctggaggaaaatggcgcctatgacgatgtcgactacgtctcctacgacgtgctgggcgacgtggtgtgcggcggcttcgcgatgccgatccgcgagaacaaggcgcaggaaatctacatcgtcatgtccggcgagatgatggcgctctatgccgccaacaacatcgccaaggggatcctcaaatacgcccattcgggcggcgtgcggctcggcgggctgatttgcaacgagcgccagacggaccgcgagctcgatctcgccgaggcgctggcggccaagctcaattccaggctcatccacttcgtgccgcgcgacaacatcgtccagcacgccgagctcaggaagatgacggtgatccagtatgccccggagtcgcaacaggcggcggagtatcgcgcgctggccgacaagatccatgccaattccggccagggcaccgtcccgaccccgatcaccatggaggagctggaggacatgctgctcgatttcggcgtcatgaagaccgacgagcagatgcttgccgaacttcaggccaaggaagcggcggcagcggcccagtgaccgccgccgcagacgctgcccgggacggtgatccggtgcgacattccaccaatggtgcctcttcttggaggacacgcaaaaaagggggcaggcccaatgagcctcgattacgagaatgacagtgcgctccatcaggagctgatcacgcaagtgctgtcgcagtacccacacaaggcggccaagcgtcgccaaaagcacctcagtgtcgcatcggaccgcgaggcggtcggggaggagggcgagaccctctccgaatgcgacgtgaagtcgaacatcaagtcgatccccggggtgatgacgatccgcggctgcgcctatgcgggctcgaagggcgtggtctggggcccggtcaaggatatggtccacatctcgcacggcccggttggctgcggtcaatattcctggtcgcagcgccgcaactattatgtcggcaccaccggcgtcgacaccttcgtgacgatgcagttcacctccgactttcaggagaaggacatcgtctttggtggcgacaagaagctggaacaggtcatcgacgagatcgaggagctgtttcccctcaacaacggcatcaccatccagtccgaatgtccgatcggcctgattggcgacgacatcgaagcggtgtcgcgcaagaaggccgccgaacacgaaacgacgatcgtgccggtgcgctgcgaaggcttccgcggcgtctcgcagtcgctcggccatcacatcgccaacgacgccatccgcgactgggtgttcgacaaggcggacggcaagacggacgtcgagttcgaaaccggtccctacgatgtcaacgtcatcggcgattacaacatcggcggcgacgcctgggcgtcgcgcatcctgctcgaggagatcgggctgcgcgtcgtcggcaactggtcgggcgacgccacgctcgcggaagtggagcgggcccccagggccaagctcaacctcatccactgctaccggtcgatgaactacatctgccggcacatggaggaaagatacgccatcccctggatggaatacaacttcttcggcccctcccagatcgaagcctctctgcgcaagatagccaggcatttcggcccgacgatcgaagaacgggccgagagggtcatcgccaagtaccggccgctggtcgacgccgtgatcgacaagtactggccgcgcctccagggcaagcgagtgatgctctatgtcggtggtttgcgcccgcgccacgtcatcaccgcctatgaggacctcggcatgcagatcgtcggcaccggctacgaattcgcccacaacgacgactaccagcgcaccggccactacgtgaagacgggcacgctgatctatgacgacgcgaccagttacgaactggacacgttcatcgagcggatccgccccgatctggtcggctccggcatcaaggagaagtatccggtgcagaagatgggcatcccgtttcgccagatgcactcctgggattattccggcccctatcacggctatgacggcttcgccatcttcgcccgcgacatggatctcgccatcaacaatccggtctgggatctctacgacgcgccctggaagaaaatgaccgtgccgacggccgcagttgcagccgaatgatcggccggtcttgcgcggcacgaggaccgcggcaagaccggaaacctctcgaacatccctgggcctaagaggccagatcaagaaggtcaaacaccatgccgcaatcggctgagaagatactcgaccatgcgccgctgtttcgcgagccggaataccggcagatgctcgcggagaagaagctgaacttcgaatgtccgcaccccgaacggctcgtcacggaccagcgcgaatacagcaagggctgggaatatcgcgagaaaaacctcgcccgcgaggcgctcgtcgtcaaccccgccaaggcctgtcaaccgttgggggcggtgttcgcagccgccggcttcgagcggacgatgtcgttcgtccatggcagtcagggctgcgtggcctattatcgctcgcacttgtcgcgccacttcaaggagccggcttcggccgtttcgtcctcgatgaccgaggatgcggcggtgttcggcggcctgaagaacatggtcgacgggctcgccaatacctacgcgctctacgatccgaagatgattgccgtctccaccacctgtatggccgaggtcatcggcgacgacctgcatggcttcattgagaacgccaagagcgaaggcgcagtcccgcccgaattcgacgtgccgttcgctcacacgcccgccttcgtcggcagccatgtcgacggctatgacagcatggtcaagggcatcctggagcacttctggaagggccaggcgcgcacccaagcggccggcacgatcaacatcatcccgggcttcgacggcttttgcgtcggcaacaaccgcgagcttcagcgcctgctcaccctgatgggcgtgtcctacaccttcatccaggatgcctccgaccagttcgatacgccgtccgacggcgaataccgcatgtatgacgggggcacgacgatcaaggcgctgcgggcggcactcaatgccgaggcgacgctgtcgctgcagcactacaacagccgcaagacgctcgaatattgccgggaggtcggtcaggccaccgccgccttccattacccgctcgggatcaacgccaccgacgcgttcctgatgaaggtgtcggcgatttccggccgggaaatccccgagacgatacgcctggaacgcggccggctggtcgacgccatggccgacagccaatcctggctgcatggcaagacatacgcgatctacggcgatccggacttcgtctacgccatggcccgcttcgtcatggagaccggcggcgagccgcggcattgcctcgccaccaacggcacggcggcctggcaggccgagatgaccgagctgctcgcctcttctcccttcggcaagcaggcaaaggtctggccgggaaaggatctctgggccctgcgctcgctgctcttcaccgagccggtcgacctgctgatcggcaattcctacggcaagtatctcgagcgcgataccggcacgccgctgatccggctgatgttcccgatcttcgaccgccaccaccaccaccgctttccgctcatgggctaccagggcggcctgcgcctgctgacgacgatcctcgacacgatcttcgaccgcctcgatcgcgaaacgatgcagacggcggtgaccgattattcctatgacctgacccgctaagaacggcggtcggcaaaacgccggccgtctcctgatgcaatctggagattagcgaatgtcttcgctcaatgtcaaaatccaagatgtcttcgatgagcctgcctgtgagagaaatcgcagcaaggattccaacgcgcgcagtaaaggctgttcgaaaccgctgacccccggcgcggcggccggaggctgcgccttcgatggcgccaagatcgtgctgcagccgatcaccgacgttgcgcatctggttcatgcaccactcgcctgcgaaggcaattcctgggacaaccgaggtacggcgtcgtccggtccgacgctttggcgcaccagcttcacgaccgatctcaccgagcaagacatagtgatggggaacagcgagcggaagctcttcaaagcgatccgccagattagagaagcgtatcagccgccggcaatctttgtctatgcgacgtgtgtaacggcacttatcggcgacgacatcgaagcgatctgcaagcgcgctgaggaaacgtgcggcctaccggtggtgccgatcaattcgccgggcttcgtcggttcgaagaacctcggcaacaagctggctggcgaggcgttgctcgaccatgtcatcggcacggtggagccagatgatgccggcccttgcgacatcaatatccttggcgagttcaacctgtctggtgagttctggttggtaaagccactcttggagaggcttggcattcgtgttcgcgcctgcattcccggtgacgcccgctatctcgacattgcctccgctcatcgcgctcgagcagccatgttggtgtgctctacggcgttgatcaaccttgcccgcaaaatggaggagcgctgggatatcccgttcttcgagggatccttctacggcatcaccgccacctcggaagcacttcgacagattgccgatctgctcgtaaagaagggtaccgatctagagatcctcgaccgcaccgatgcactcattgcggaggaggaggcgattgcgtggaaaaagctcgaggaataccggccgcgacttaaaggcaagcgggtgctcatcaacaccggcggcgtgaaatcctggtcgcttgttcatgcgctgatggagatcggcatggagatcgttggcacctcggtcaagaaatcgacggtcgaggacaaggagcgcatcagacaggtgcttaaggacgatctccagatgttcgagtcgatgtcgccccgtgagctctacgccatgctctcagaacataaggccgacatcatgctgtcgggcgggcgcacgcaattcattgcgctgaaggccaagatgccctgggtcgatatcaaccaagagcgtcaccgcccctatgcgggctatgacggcacggtggaactcgtgcgccagatcgaccttgcgattcacaacccggtctggtcgcaggtgagggagccggcaccgtgggaaagccgtcctgccacacaggaaccactgccgaacacgcgccccgacaccgatgctacgagtgtcgggcgctcaattcgccggcacgacgccggtgacttcgttgagtgttgaggaaagcaaatggtccacatccatcgccaatctaaatcagcgacggtcaatccgctcaagtcgtcccaaccgctgggtgccgcgttagcctttctcggggtcgatggcgcgataccgctgttccacggcagccaaggctgcactagcttcgcgctagtgctgtgcgtgcgccatttcaaggaaacgatcccgctgcagacgacggcaatggacgaattggcaacagtcttgggcggggcagcccatctggaagaggcgattctgaacttgaaaaagcgggcgaatccgcggctgatcggaatctgcacgacggcacttgtggaaacccgttctgaagatttcgcaaggcaaatcgccaacatcaaaatgacgcatgcggaggaacttgcaggcacagaggtcgtgctggcaaacacgccggatttcgatggcgccttggaggagggctgggcgagggccgtcgccgcgatgatccaacagattacactgcggcgtcagcaggcgcctcgctcgagaaaggcaacactgatcgagaggattacaaaacctagcgagcagccgtggaagcaacagaaggttgcgatcctgccgggatggcacctcacggtaggcgatatcgagcagttgcgcgagatggtggaaggtttcgggctgaggccggtgatcgtgccggacgtctcaggctccctcgacggtacggtgcccgaccgctggatgccgacagcgtatggaggtacaagcatcgaggatatacaggagttgggtagggcggtgcggtgcatcgccatcggggaacatatgcggcgcccggctgagctactgcagacgttgacgggtgtgccttacgtgttggtccagtcgctaacgggattgaagaacgtcgaccagtttgtctcgcttctttccgagatttcctgcgtgccggcgccggcgaagatccaccgtcaccgctcacagctgcaagacgcgcttctcgacggacacttccatttcgccggcaagaagatcgcgatcgccaccgagccggaccagttgtaccaatttgccaccttttttacgggacttggcgccgagatcatctcggccgttacgactacgggtgagtcagaaattatcgagaaagtcccggccgaaaaggtccagatcggcgatctcggtgatctcgaagatctagccggcggcgctgatcttctcgttacccattcgcacggtcgccaggcagcggagcgcctcggcatccctctgctgcggatcggcttcccgatattcgaccgcctcggcagccagcacaaactcacagttctctatcgtggcacgcgcgacctgatcttcgaggcggccaacatcatccaggccaaccagcccgcgccgtcgcttgagcaaatcgatgcaatgcgaaagcggagaaatgccggatgaattccgttcgtcgcctctcgctcgtcactgacgaaatccagccgcggcgttccggcgcattgcgcatagcgatcgcgacgcaggacatgaaagtcctaaacgcccatttcgggtcggccaagcactttgcagtctacgacgtgtcgcgcgacggctgggatttcgtggaagctgtgagcttcgatgacgtctccgacgaatccgggaagcatccgatcgagggcgaggaccgcatcaccccaaaggtgaccgcgttgacaggctgtcatctcctcttttgtcgggctatcggcggcccttccgcagccagggtcgtctctgcgaaaattcatccgattagagtgggagagccggaagccattcaagacgtactttcacgaacccagaaaatgctcaagacggcccctccgccgtggttgcgcaaggtgctggcgcaagcaggcgtcgcagagaaaaaaccattcgaggacgaggactgaatcatgaaaaaaacgtccatcaatacgggcacgcctgatgtcaaggtggacgaggcggcccttgtcacgccatttgtcaaatgcctcgcgcggctggtccgcgcgcaggatacctacggatcgcaggaccgcgcatcggacgcggagttgttggcccacttcatcatcactgaagagcagcgtcgagaaatcccgatcatcggcgatcccggtccggacgtcatgttgcggttcaatatcttttataccgccgtcgcgctttcaatcgaagcacgtaccggtttggtagcgtcgccgatcacgatgatcagccatgagggcttcggacgagtgcttctaacgaccgggcggctggtcgtattttcgaaaacagtgcgcgacatccaccgcttcggcttcgcgacacttcgcaagcttgcggaagccggcgcaaagctggtggatgatgcgacggccgccattgaaacctatcccgaagtggctcgggcctgacgatcgatccggcaaaaggcatgctgccggcgccaaggcgaccggccaaggattagggctacgcccgtgggcggcttgagggcgagtaaatagtggatttttccgaaacggagggtatgagcccgtgcatcaacctcagcgacgcgcgccgccgtctgccccgggcagtttatctgtaccgcttgagtactcgttcggtagccgccgatgagaaccatgtgtagtaattcaaacagccgcttcgacactcttgtcggtaaagcgacacattcttgtcgactgttcccttctctgcctcccggctaaatgcctgaaatgctaacataacaagcttcttttcaagtcgagcacccgagtggcacgagtcttgccgacatgccatctaagaggctggaaagccggggatcggcagggtacgaatgaggcaagcaacgtggcaggtctaggtcagatcgcattcggctgcgagggaggcatcgacacgtgcaccgccgcccagaatacgctcgctgttttttttgatctcggaccgaaagtcggtagtgtcggccgcaacctgaagagtaactccggccgcttcatcctggaaccaatgccgcgggacagcgcgccagcgtggtacgcgatcatccgcgatttcgatgcggacgtgccgtggaggctcaaagctttccacaccgccgccgggcttgcgatcgaaccgtccgttcgctccgtgtacgagggcttcgcggtgcttctcacgaccgggcagagtcgtatcgaccgaacaccatccgtcagtcttccaataggaagctcgctggagaccgaagcgataaccgccatccacgcacccaagtggcgcggttgacggtcgatctaggcgatgacgaaccgccggctctcatttcccctggagagccgacgtcaggcagcgggaccactcctccccacgcgcaccggtcccgctgccgcgatctttccacagggcgaggctcgaaatgcctagccaagtctttgcaatggccgctgactagcagaccgcccccgaaaagtcggccgacaagaccggaatttcggcggatgtgacggatgaggtcacgtccgatctcggaagagattttacttttttgcctgtggcggatgcggagagacagatcctgattggagaaccaacgatgacaagtcatttcgttacccgcgacggctccacatggatgccgcagtatctgacggccattgacgccatgacgtgcattggttgcggccgctgcttcaaggtctgctcgcgcgaggtcatgcatctgcacggcatcgacgaatccggtgagatcctcggggcctgcgatggcgaggacgacgacttcgctggcgagctcagtcgcacgatcatggttgtcgatcacgccggccgctgcatcggctgcggagcctgcgcccgggtatgcccgaagaactgccagacccatgtagcggccgacgaaattgttgcttgatctgacgaacggactccggaaaacgactttggccgttataaatgcgatcatattcgagacgacagtccccaaagagcccttgccgtcgcgcaagctgacgaaagacgtagacatcgccgaccgtcggccccgtcccgcagctagcagccgacgtagaacaacgaactgcccagccacctgaaagccagagtccgccgaacttggaatgagacagaattggcacaatattgatttcctcgcgtgattcagggtgaatccctgccttggagtcaagaggcaattggcgcccgcgggcactcagagaggaccttcgaatgccccgttggcatcggtcagcaacggaatgcgtcagcagcctgagcgatcagcagttaggttacaaaagcactgctgctcgaagcgcacatgccgacgcaaattggtgaagaaaccacggagcatatagcccgctgcctccggattgacagtagcatccgccgtcgccagccgacccaacacttccgccaattcctcggcgaagcattcgtcttcgcaatgctcatacttgagcagacccaaagtagttaaaactgatggatcgtcccctagcttctcctctgtccacgcgaaaacagcagcttcttctctctcgtgaagattccgtaagtgcgggccaagcatctttccggcgtgagcgcatatactacggtcgactccgtgcggaaggctgtttgcaatggcctcgagacggtcacagagagacagttggtcctcgtgcgaacctgccaataaggccagccgctcggcggtggctggagctaatgaccggtttgtggggggcgcaaacgtcttgatcctagcgatcatacactccaggccctttccgtgctttctctaaggtaatcttccgtgctcaaggatgaggtaatgcgtggtgcggggccttgacttgaatcaaggtctatcggcaataggactaaataatcatctcattgtctgatggatcgtacgcggcgtttccccccaagcgctctgctgttgtgagatcgccatgagcacgtcgggagtcccagctaattgtgagacgctgatccgttgtgcatggacccacggcatgagcgcgtcgatgtctttggcgagtggcggttggcgatgccgatgaagaaattggtagactgggttcaacaccattcatcttgcaaatcggacccagctaccattgccttgatcatggccggcacagagagcgcattgcggcgcttgggtttcttatcggctttttcgacgaagccctgcatgtcgcagggagagccttggcggacacgaatatgcggcgccgcatagacccaggaacgcagcaataacacgatcggcaggcgtgaacaggaagtatggcacccctatagtgccaatgaccgcccggaaccatgtcgggcgggaccgagcgagctcgcctactcggcagaaggccagcctctacggatcgccgcctgtcggttttggacgcggcggtccacttttagccgccaggctgtcgttgttcgacatacgacaatgttacaatgccgacatagctagttcgatccaggtacttgaatttaaacgggttttccgtggcacgtatcttgctctgctgacgtgtcagcgtcgacgagaattgtgcggagaatgtcgaaatgtcagaaccgttctttaggccggggtcggggcccgcgcccggccaccctactgcagaaccttggagaagaaggaagaggtggtactcgccaagcgatggtcgagctggcactgcacggtcgcatttgccacagcggtcgacgagccatgatggagtgtgttcgcgtatctgtgcatttgtcctatgtatggtcgcactgcaatttctgatgacctcagcaatggcggccgacgagagcccgcttcgcgaagccgaggttgcaaatttcatgctgggcaacggcatggaggtagtcgtcatacccgatcaccgggcgccgatcgtcacgcagatgatctggtataaggtcggcaatgccgacgagccacccggcaaatccggcattgctcatttcctggagcatctgatgttcaagggaacgaagaagcatccgtccggagagtttagcgcaaagatcgcggagatcggcggtgaggagaacgccttcacgggttccgactacaccgcctaccatcagacggtcacgccagagtcgctcagaacaatgatggaattcgaagctgaccggatgcgccatctcgttctcaccgatgcggtgatcgtacccgaacgcgatgtcattcttgaagagcgacgctggcgcgtcgagaacgatccggagcagctacttgaggaggagatgcaggcgaccttgtatcagaaccacccttaccgcatcccgacgattggctggatgcatgaaatggaacagcttaatcgcgaagacgcactaaagttctatgaccgctactatgcccccaacaatgccattctggtcgtggcaggcgacgtggacgccggcagggtgcggcagctagcggacgagactttcgggaccctgcctcgcggtccggatctgccggcgcgggtgaggccgcaagagccggagcagaacactaaacggatcgtcgcgctcaccgacccgcgcgtcacggtgccgagcttccaaaaatcctgggtaacgacgtcctacggaacagccgagcagggcgaagcggaagccctcgatatcctgtcggagattctcggcgggggaacgcgcagccggatctatcaggagctggtggtcaaacaggcaatagcctcctctggcggggcctatttcaacggaaggtcgctcgatccgtcgagcttcacggtttttggctcgccgcgcggcgaggcgaagattgaggaggtggaggatgcgatagacgctgaaattcggaagatcatcgagttcggcattaccgacgtcgagctcgagaaggccaaaaaccgcttcgtgcgctcgataatcttcgcgcgcgacagccagtcgggaatggccggcatttatggggcggcgcttgcgacaggcgatactgcacacgacgtagaggcgtggccacttaggatccgcgccgtaaaggcggcagaggtgcaagcggctgccaggaaatacctcagtcccgaccggtccgtagcggggtatctgctgccccgcgaaagcgctacctcaggagataaaagccgatgatatcgttcagccgactgcgcatcggggccaagccctcactcgtcgtggcatgcatattgctgggccttgccgcgtgtccagcgcttgcgggcatggccatagaggaggtcgagacatcgagcgggataaaggcgtggctggtgcaggactattcgctaccgatcgtcaccacccgcttcgcatttcggggcggcaggacgcaggatccatctgggaaggaaggcattgtgaatctgatcacagagctgttggacgaaggggccggtaatcttgacagcgatgcctttcaggagcggctggacgatgctggcgccgagatgctctttgaggcggggcccgatgcagtctacggcaatatgcgggtgcttgcggagcgaaaggatgaggctttccaacttctccggctggcaatcgagcagccgcgcttcgaccaacagccggtggaccgccttcgtgcccaaatcgtctccagcatcctggcaagagccaaggatccggagacggccgcacagttcgcatggatgagggcgatctatggtgatcatccgtattcgcgtcgggaggagggcaccgtgcaaacacttgccgctgtcacgacctccgatctgaaggcggttcatgagcggattttcgcgcgcggcaaccttaccattgccgtggtgggagcgatcgatcccggcacactcaagcgtgatctggatcgaatattcggcggattgcctgctggcccctccctaacgccggtcgttgacgcagtgcctaagctggggcgcgccattcgcgtcgcgtatgacttacctcaggcccaactgagcctagcttacccgggaatcccccgaaaggacccgcagttctttgcagccaatctcatgaaccaaatccttggcggaggcgcgttcacatccaggctctggaatgaggtgcgcgagaagcggggcctcgcttacggcatttactcaaccttggagaacatcgaccatgcttcggcgctcgtcatcggcaccggaacccgcccggatcgggccgcagagacgctctccctcatccaagccgaggtcaggcgaatgtcagaggagggcgtcagtgaggacgagctcactgcggcaaagaaaaagctcatcggcggttatgcgatcgaaaatctgaactcatctagtgcggtcgcccaaacattggtccaaatccaactcgaagatcgcggcatcgagtacgtcgagcgccgcaaacaactgatccaggccgtcaccgtggaggacgtacgggcagtcgcgaaacggctgctctccgccgaccccaccgtaatgactgttggaccgtccctcaagggaacgaaccgatgaccgtccaaaggaaagctaggctggcagcgtccggccgaccttctccaacgccccggcgcggcactaccttgggaggggggtagtcaagatcacctctcgcggtcaccagatgttcagttccaggctctatgcgactcctgaagcagcaagggagtgcatcgcagcctccctccgcccgacggcaggagagaatgtggtgtctcggcgaaaacaggcgaatgctctctagcacgactgctcctgcgatgctggtgacctgctggcaacgagactgcttgaccctgcagcagcggttctcgcgtcactcacgaaagcgcatcagcaccaccgctaaggcttcacacttgaagcataatccgaatgtgcttagggtggccgccgaagactccagatgtctcaattgagtttctgactttcagttgaggtgtgttaaaggagtgtaggtgcgggaggtggagctcatatcatatctcccgaagaactaagatagccgaaattgaggagacgaatgtgctgagtactaactctgaacaaacaagacgtaagccaaacgctgtggatgcccatgtcggtcaacgaatccgccagaggcgtgagtggcagaacatgtcccaaacgactctcggcgaagctatcggggtgacgtttcaacaggttcaaaaatacgaaaagggcgtgaaccgcgtcggtgcgggtcggcttcagcagatttcgaaggctctgaaagtggagccttcctacttctttgaggatacgcttaataaaatccggtcggaggagcggtccgcttcaaatcagattaacatcccacccgaagtcgttgaattcgttgtaagcaaggaagggatcgagctcatcagggccttttctcgcgtgggcgactatcgtgtgcgccgccgaatcgtgatgctggtcaagtctttgggcgcacacgagcggtgatgtatggattgggccgcttctgtgtggagacagagtgtctctataaagtcggacaagcaccaccgcactgggaaatgagtcaccagtctgtccgatactctcgtacggccctttaccctttaaacgtcctgaaataccaaggcgatactcgccgatcaattctccgaatcttggcgggctgagcggcgcgccggtccttcgggatactgcggcgaccatcgactgcgagcttgaggatctcatagaacgacacagccatgcgattatgctcggccgttttgtcgacatttgcaagggcaacggtcgttcattggtctatcgtggcggccgatatttgcaattgccgggtagcgttataggcaaaatcgctccgggactcaccgcactgaaaagctattgaacgtggtttttgcgcaagcctgtctatgatctcaatcaattcatctgtagttcattcgtgctagcttgagcgcagccttagttgccgaccacgatccgacttgaagcgagcgatgctttctacaccggtttcaccggtcagagcggaaaagaagagtccagccggccccgatttcctattctgagacctcagaacggagatcgagatcttttcatttgtagcctgccgcggaatgggcgagcgctgacctgagttctcagggtcagctaggcaagcgccggaatacgactggacgtgatcaatcgacgtcagaagctatgggatgttggagaagaaatgcgtaggttgcttactccctggcgcggtgtcgctgcaggctttctgttgaacgggatcctcctcgggacctgggcttctcgcgttcccgccgtgatgggtcactttcacgttgccaaagcgagctttggggttttgctgttgcttttagggttgggcgcattaatttcgttccccattaccggaaggctgtccgatagcttgggtgcagtgcgggtcgcccgaatgatcgcgatcccgttcctggtttcgattgccgctctagggcttgcgcccacaataccgctgctggcgatcgccctatttctctttggcatgtgtcatggctcgatggacgtagcggtgaatagttgggcgagcgaagtggagaaacacatgggacggccagtgatgtcgtcgtttcacgccatgtggagtgtgggggccgttctcggcgcagcaggcggttacattgctacagtctttcagaccccagtgtacgtccattttcttgttacggccgtgacgatcggcgggttgctcggacccttccttctgctcgattggcaatcaaccatccgaacgcatgaaagtggtgcagtgggattggtgttacctaacagtggcctttttcttgtggggctcattgctctcgcctctggactaggagagggtacagctctcgactggagtgctgtatatttgcatgatgtagtcgggaccgaagaatcggacgccgccttggggtacatgggcttttctgcggccatggtgatgatgaggcttaaggcggattctctggttacgcgatggggatcagccactgttgcacgcataagcggtttctcggctgtctttggcattttgttgatcgtcctcggtgaaaccttgccgttagtcgtggcgggcttcgtgctgatgggggtcggctatgcggccgtcctaccattggctttcagtcgggcagcggccgatcttgtagtgccggcggggaaagccatcgcgtccgttgcaatcttcgcatatggcgcaatgacgttgggaccctttgcaattggactcctcgccgaggcagccactatgcgtttatgcttctttatcgtcggactatttgcagccttggtggcagtattggctccagtgctcaagcaatagaacaaatcaccccctgctttatcgcaccttgagagattttagcgttttgtccatgagagcgacgaatactccgccttttgctgaccgaggccgcgagtattcttcatcggcaggcgcggaacggaacggttggagatcacgccgacgccatttttgaaggcatgggtgaaccaggcatgaaatggatcgaggtgaccggccgaggccagcggcggtatcggactgacgaagatgagtaatcaaaagtcgataaagcgttaattcatatcatcaatggctgcgatgaaaacaaatgattttactgaatagatgcgggcgaaatagaagaacgctcatcaagttggagtcagtgaatgtgcggcactgttagcccaactcgcgttgactgtcggacaaagcgactatcctctaggaattgaatggagagaactatgtctgatgcaaagctgcaacgcgtactttcgtctcttacggaagtgtacagacagctaaattctctgccgtccagtcagccatctgacgccggctatgtcaaactcgatacaaacgagaatccatttgcgttgccaaaagcggtaatgcagagcgcagttgctgctctcgagcggcagtatttatatccagaggatgacaacatcagtttgcgggaagccgccgctgcgtcctatgatctttccgcggatcaggtgatcgccggtaacggttcgtccgaacttctttcgctcatatataaagcattccttggtccgggtgacagtgtcgcgatgctgtcgcccggctttgcatacaaccgcaagctcgcccagttgcaaggtgctcgattacttgaaatcaaatggggcgagtcgtccttgttgccgatacacgaattgctcttcggtcctgcaaagcaggcaaagttcatcctgctggctaatccgaacaacccgacaggaacatttgtcccgattgctgatattgaaagcctcgtcgcactatctgaccagttggtggtactcgatgaggcctacgtggacttcgctcccgacagcgctctgcgtctcgttaaccgctattcgaatcttctgctcttaagaacgttttcgaagagctatgcggcggccggcattcgcgtcggcttcggcttcggtcatcctgaggtgatagggaggctgcgcaatatccagaacatgttcaatatgaatgtgatcggccatgcggttggcgtcagcatcctggcccaccgcgccacctataatgagaaccaccgccatatcaggcatgagagagagcgggtgagggtggcgctgtcgcgacttgggttctctgtaacgccctcccatgcaaactttttgctggcgcgggtgcctgcaggacgagacggcgtttggtggcacgcctgcttgaaacggaaaaagatactcgtggccgttcttcccgatgaaggtctggaagattgcattcgcgtcagcatcgggacgaaaccacaaatggatgcgtttcttgcggctgtcgaggacatttcgggagctcagcaatctcgatgatgggaccgtatagcagcttcaggctcggctcttttgcacgtgggaaaagacagtggcgacaggaaagagagcgacaaccggaagactggtctcccacagcgctaactacgccacgcccgtgaggaagctgagttcatagcctggcgcctgcatgtgtctaaaggcgtgctccacaacacaaggtcgctgggacggaaacatctgccggtaggtgcactgaaaaactgttgagcaatagccgagcacgcaaggatgtggcctgtcggcggcttaacgatttggcttccgccaccgttaggcaagggcaggctcaccgtgaatagcgatgttcggccaaataaagcccccaaggtcttatttcgctcgaattgaagtccggggctaccagggttaagtgagacgttaaatgagaaaaatccttccatcaaagctagctttcggcatattcgaccatttagacgaggacggtaacgccatggcacggcaatacgcagaccgcctcacgctagcggaagcatgtgatcgtctcggcttttacgcttaccacctagcggagcaccatttttcgccgcatgggagaagcccatcgccgaatctgttcctatcgagcgtcgcgcagcgcacccgtcaacttcgtcttggcccgcttgtcatgctgcttagcctttctcatccgctgcgtgcgtttgaggagatctgcatgcttgaccatttgagcggcggtagggccgagttgggcatagggcgcggctctcttccgatagagctaggttacttcgggatcgatccggacgcggtggctggacgctatttcgaagccagcgaaatcctgatggaggcgatgaggggcggcaatctttcctaccgcggcgaccactttgaactaaacaatgtccccttgatcctgaggcctcatcaacgcccgcacccaccgacttggatcgccaccaaccgacctgagtctgcacgctgggccgctacaaacggcgcaaatgtcgcatgtgtgggacccgcctcgcttgttcgcaggattactgatgccttccgttccgaggaaggactcagctctgacgcgaactgcaacgcgtcatttctcggactgctccgcatgattgtcgtcgggcactctgcagaacatgcatactcgcttgcggctcctgccttccaacgatggctgaataatttcaaattcctgtacgacctccatgcaattccagttccgccaaatctgcccctgaccttcgatgcagcaatcgaaagtgaattgtgcgtagtgggaacggcggctgttgtgcgacggactctgcttgatcagttggaagaggcgggcgccaactatctcctttgtcaggtcgcgtttggagatttgcctttggatgcttcgctgtataccgcaatgaccattcaatcggaactaatggatcgagttggctgagtgccatggcgcctgacgaagtcaggcgtgtgtaaaagtgacggcttcctgtcgtatcaggcgcaactccaattcggcccaaaaatcaacaatgggctggtcggcgctaagtacatctgactcgaaggtgttttatcgggtagcgtggcttctgggaagaggtaagatggccgagatcgacgcaatattgataacagacgtaaacggaataggaacgaccgcggatgatcaactagcatttgtcagtttgattgctgatcaaggggaaactaccacagtagcattcggtccagaaattggcagcagaatagctgcttcgttcatggccgcatgcggacagctccaacatcaaatcgctacgagaacggggaaggaggaaagaaagttcaagccctttgctgcagccggattcagcgtcagagctggtctggccgccgatggctccaattcgggaatgttatcaatttcaaccgtagcgggcgctgaggttcactttatagcaacggaacgttctcttcgagaactcgaaaaccaattaacgttattgctcgaacaattgcggttacgttcgcgaccgaattaatgcgattgtagcggtaacaaagctcttatgactatcatggctagcaaggcctggcagtaatggatatcacccatttgggtagaattcacgcgggcaattcgaacgacaatcattttgggacgagcggcgctggctggtcgtccatgttgagtgcatattttcccaaacggcgaatatgcccggtgttgggactgagagtggcggcaagcttcggcgtgaagcccgcctgaccacctgccgaaggcatgtcgcttgctaccgtaataccaacttcgctcgggatctgatcgagcgggaagtctccggcgccgcatcccaatcgtgcgctatgcggatctgtcaatcaacagcgcgtcgccctgccgccgccacggcctttgccaccagccgcattgaggctggtggcgtgagccgactgccataattgtcgtgccgggcgcaactccaccgctacgttgcctggatgcgcgacgaacgcgttcgctgtttcgtagtggcggatcggtctcctccttgtccatcgctcgccagcgggtaactgctcatcgtctctcttttcggcacccccgcacccgcaggcgatagtgacagcgccgataggcttgcacctgcgtgcgaccactcttccatctcctcaatagcctccatccaaataagcgattttacatatctgctgagatttcccattagaatagcgtggcgttttgggttgaattcaattgggacaaggatagcagtagacgcggagccttctccacacacggctgccccatcgagtggtatgggctgtcggcaaactgctccggtccgaagccgcactctcccgcgccctgcttgaaaccgccgagcccccggttcgcccgcaggggccgtgtcaaccgtatagtcgctctaaagaggaccacctgtgaaacatatcgttgcaaccttattcgggatactgtttgctacagctgccaatgccgccggcgatagtcatgtactggcgagctttcccgagcttgaacgcgcgctgactaccggcaaaccggtgactgtgacggtcgatttaggcatgtgcactccggcgacttccgatacaccgtcgaccaagacgcgtggaggcgttagcatagacggctataggatcacatctgacggcaccctcgcttttgcagatcagcattttaccatagatcgtgacggtaagccggttatccagtttcttcgttaccggatccggccggacggtggcgccgaattcaccatggtcgtcttcaatgtgcccagttacgagcgaaaaggaacgagccgggtctataagtgctcaattggtcacggattgagcttcttctcttcacagtgatctggcatgttgcagcacgatcgcgcgggttcgggtggcggatcgtcccggatcggcggctgaaggtttccctggggcacccgcccgtgccatttgcagtggtcccgataggtaaaggaacccgcctgccgctatccttgagcttcttcagcggtctgttatgccgtcgctggtctgccaagcatagcggtcatcgaggtcctcttcgatcacgccggccgcgtataactgatcgagcaggtcggcgacagcaagtacgcttattccatccgtcgaggcccgcataaccaactccgaggctgtaaagttgccgcacgcgattagatggccaaccgagatcggagcgtagtcgagcacccggtgttccatgcttcgcgagcggagatggaagcagcggtctcccgctgtgtactccaggtccctgcgaaagcggatcggcaggtcgggggctgggctctcgagcatatgttgatcaatcatgctcttgagcccgtcccggaactcgtcaggcgtcctgaatgaccgttgacccactatgcgatacccgaggggccagcgtccgctacccggtaccggcgtcactagttgcaaacgtctctgcggcatatttacgaggaagccggaaacacaggcgatcgtcgtgtgatttcgctccggaaaggcgattgcctcttgcctcgcactgagtttctccttccgcttgcgcgcccgccccgtgaaagcctttgcggtcggagcgtccttgccctgcatgatgagttcgacccctgtcagttcttcaggcgaaaacgccctgtggatctgattgagatgtgccgtgctgagcacagagaagcgattcatcgtagtgccataaagattgaagaggccgagcacgcgcctggtgagtgcctcatccttgagcggggcggccgtcgttgtttgcggcaatgcgcccgtgatctgatagtagtcgaagagaaagcggtcgtactgcgggttgtccattggctctgtggcccagtagcagaatccagtacgagctgccgggccaaacacctcgctcgcgacaccaaccacgccgcgccaaagctctgcatgctgtttgctatactcgtaatagcctttgaacggagcggccgagaggccgcagaaccagcaaccgacggtgcacccttcgctcagctcgaaagcgatgatggggtgcgtgatcgacggcgctgatccgcccaattcgtcattacaacgccgaatttggcgctcgcgccaggcatgaaagcgagggttggtcattgacatatcgccatggtcgcgcaggaggtcgcgatggcgcaacatgtcgcgcatgtactcgtcccacattatcgacagcggccatggggcagactccggcttgtagcggtaagtaagatgatcatcgcgccagagcggcagtatctccagtgggtcaacttcaatgccatagcgctctgttaccgcgcgaggggcgtcgacgctctccgaaaccgcggtgcggaactttatgtcaccagccagccgttccatgaaacgcttgatgtgcgacaaggtgcgccgttgctccggcgtgcgccggttaaagatctgtcgccaatattcgcctttataaaggtgagcccttgaagccgtttcttgtaggccagatcgcatgtctcgttcccgatgatatttgctgtcatgctctcttggcaccgatcgtccaagccaatgcgctccggtaaaaaatcagcttgaaacatgaacaacaattacaacaagttgaacgaccgcggcgacggcggcgcctttttcagcaatatgcaacggccgcgtgagcccatccgtaacgggactatccaaagcactagattgtactaagcgcggcaaggccggaacgcgcgagccacgcttgctgttcgccatcgcttcgagcttcttgccagtagacttccgtcggctgtccaatcggatgtagttttgaacttcgtcaagcgtgatgttgtagccgagactctttccggccgctacgatcggtgcaagacccgtggcacttggcttgaggtttgcaggcagcctgcctttgtctaaatcgttgacgaatcgctctacgtcagctcgcggcatagctaattcctttgctcatagttgccaattgcaggcgtggatgatgccgtgaacgagcaagcgccgtgccaacctaaaaatgtcgtcattttgtgcattttcagagtgcatgcattgtcaacttaccgacctttagtcccgaaccggccaattggccgctccgaaatgtagacatccgcaaaattcttcactaaggcaggctctcttttttgccagctcagttgcggattccgccagtcggttcattcagtgaaacatcgggatacgctcaaaagcgtgacgacggcgtagcggcgtcagagagaagcgtcgacgaatcgtgcggagtgtgggggtcacaaacggccggcatagcaggtcgacgacccccacggcggtggggagatcagagctgtatgcgtatcatccggacatgacccaggctcatgcaaccctgaccgcgaccagcgctgaagcgggccgacggcatcgggttggcactttaggcaccgacgcattagcaatggacgcgcatctgcgccgactgggtatcggcgatgtgcattatgatctgtctaggtttcgatcgccttggtcttccgacccttccatgcaccacgtgccaacgagttttattacagcctgctaaactaaccgcttcattccaacgcgtccggagccgcgactactttgtcggactgatgacatcgctgtgtcgcaaccccgccgcagtcactgatttcggatggctgcaagagttcttccaatggtacgaagacttggattggcgcagcagctttagtcggatcgcgatcctcaagcaccttgaaaacacgatgtttgagtggcgacgaagttgcaaagtccctgtaagcgcgctcgagtgcggcgcgcgcacgggtggcggccgtgcctgtggggagatcggaaaagtcctccgcgaccagatactgacccatgcgcttcattatgtggagccgtgatgtgtttagcacctttgggtcataggtgacgccgagggcatcgaagaactcctcggcggccgacaaatccttcagccaggtgagaatgtcagtgccatcaggggcaaaggtcgcatcatcataagacattgcattctcctactggccgcggaatagctgctttcgttccaacacatggtcccggccctgcaccctatgatgaccctgggaagagctgtgatcgagacgccatcagtgacggctattcggacatgcccaagcgctcaaacaatcgtatgtgccggcagagcgtctacccggcaaatactggacgagattcacgcagttttttcacaactgcgggtatcacccgcaacacccgatctatatcctcttcacagttatagcctgacaacgagaagcggactgctccgaccgcctgcctgtggggagtacccatggcttttagcacatggctcgtcgataaagaacgagaggtacaggcggatccggaggagcaggcgatgccatggcgattgagcagaaactgcatggcttcaccaccgacgccttcaaaggcaatgctcgttgtgttgggcaaccgcgtcaccggatcacccattacgaagacttgggggacacgctcgagaagtcctttctccaatcgatcgcggaatgatcttattatcgcattgtccttgtccatacaatccaacgcgagttctgccgccttgcccagacctactatcccgggcgtgttctccgtgcccgcgcgccggtcgcgctcctggtggccacccttgatgagtgcgtgaaagggtaccccgcgctttatgtagagtgccccgacgcccttcgggccatggaacttgtgcgcggaaagcgacagcatgtcgatcgccgttgatttcaagtcaatcggtagcttgccgattgcttgcaccgcatcggtgtggaaaattgcgccgacttttttggccatctcagctagctttaccacaggaaagatcgttcccgtctcgttgttggcccacatgatcgaaacgattgctacacggtgtgtaagggcgtcctgataagcgtcaaggtcaagtcggccctggtgatccactgggaccttgtgcaccttggtgccgcgtgtcttctccagatgggtgcagagcgtcagcaccgcaggatgctcgaccgccgaagttacgatctcagtgcgctcaggcatagcctcgagccccgaaaggatcgccgcattgttgctttcggtcccgcccgaggtaaaggtgatctctgggtcgaactttgcaccgatcagtgcttgcaactgcctgcgcgctacgttaatcgctgccccggcagtagcaccagcgtcatgcatcgaggaagcgttgccaaacacatctgcaaagaatggcagcatcgcctggagaacttccgcatcgacgcgcgtcgttgcgttgttgtcgagatagataggcctcaagataattctccagctaccgaaacgacgaaaggtttacaaatggcgatcgtggcattgtagaagtgctttttgatccagcattactgttctcccgtgcgtggcgatcagccgaacgatttgccccaggctcacctctcccgcgcgttgaaacgttgaagactaacccgggcgaatccacccttgggatgacgtcccggccaggccggccacatggggttgggggtccgagtcaacaaatatgttgatcccatccttctcgataacagtgtcgccctcgcgcgactcagtctctaatgcaaaatggtatatgcacagccgtccgcttgaaccgtcatatgcataagccatcggtcggttcagaatcgcgggaaggagggagcttcactgcactaacggctcttccgttaagacctatcatggatcgtttctcctggttcgaaaaggcctttgcaaatcggtcaagcacaaactatgccaacgaaaaaaacggttttgaaacaacaccgaaactcaaacatcggtgtgacatttgtccgacaatgtcggaaatcggacattgtcgaattagcccacaccaaagagcgcctctgtgccgcaaacaagatgcaatgtgatgacttcggcggcgcagctcttcgaaagcttgatggcagacggaggatgccagccatagcggcgattgctggcacttgcctcactctacaatggcggcccccgttcggaggcagcgccattcggcagcgagatgctgcagtgttgggtccccaacgaacggtgcaccgcggcgaccgagcgacactgaatgacgctcagcgcccggggctggcaaaggacgtcgaaagcaggctatcctttaaattcactggcggcgcagatttggtccagaagttgcgcatttcggatgaggcgacggtcgggcgtgaactggtgacgcccggcttcgccagagctcccgcaaatgcaactacagcgaacgcccgcgggcaaatgacaggcagcgctcttcgaccaccacacctcggggaagcccagtccgtatttcggcagctctttcggccgggccagcgcgtcccaataggcgatttgggcggccagcttgtaatagagcggaatgacgtaattatgggcgagcaggacgcgatcgagtgccttcgttgcggcaaccagcgtttcgcgatcctttgcgaagatcacgcgctcaatcaaggcgtcgacgccagggtcggagatgccggcataattcctggagccctggcgtgtggcggctgccgatccccagtagtccgcctgttcgtttccggggctcaaggactgaccccaaacttcccaggtcacatcgtagtcgaaggcacgcttgcgattggtatattgcgatgggtccaccgtgcgcacgcgcgcttcgataccgatccgcttaaggttctgcgcatagggcaaggcgacgcgctcgaatgacgggctgctcaacatgatctcgaaggagaacggcttgcccgtctcagtattcaccatccggttaccgttgagctcgaaccccgccttgttcaggagctcgatcgccttgcgcaggttttcgcgcgccttttgcggcgtgccgccgaccgggttgctataaggggtggtgaacacttcgggcggcacgaggtccttgacctcgttgaggttcttcagttccttgccttccggcagaccggaggaggcgagttctgtggcgaagaagaagctgttcacgcgctgatactgattgtagaagatggtccggttcagttcttcgaagtcgagcgcatagttcaatgcctggcgcaccctctcgtcgtcgaagggcttgcggcgcatgttcggcaccatcgcctgcatcacggccgttgcccggaaggggttgggaatttcctcgcgtttaacgcggccatccttcaccgccggaaaatcgaaggccgtagcccagcgcatcgcctggttctcccgccaataatcggtgttgccggagcggaaggcctcgaactcgacgtcgcgatcgccaaaaaaggaataggtgatcgaatcgaaattgttctgcccgacattgacgttgagcgcgacgccccagtaatcgggccggcgctcataacgaatggtcccgccgggggcgaacgaagcgatccggtagggacctgaccccatcaccggttcaagcgtcgttcgcgaaatgtcgcgcggcttgccgtccggtccagtgccctcccaccagtgcttcggcacaatccggatctgcccgaggatatgaggaagttcgtgattgtttttgtcgtcgaagtgaaaggtgacgtcccgatcccctgtcttttccgccttcacgacatgccgatagtagctctgatagagcgggttcagttccttcgccttgtcgaagctgaagacgacgtcttccggcgtcaccggcttgccgtcggcccatttcgcttcctgcctcagccggaacgtggccgaggagatgtcgtcggggaaggaaacgccttcggccagaagcccgtaggccgtcgaaatctcgtcctctgacggtttcatgagcgtgtcgaagacgaaatccaggccgacggccgtttcgcccttcaccagcaggggattgaacgtgtcgaaggtgcctgtctgtgaaagcctgagatctccgcccttaggtgcctcgggattcacatagtcgaactttttgaagccgggcggatatttgagatcatcgacgagcgacagtccgtagtgccagaccggctgctcttgagcctccgcagccggcaccagtagtaaggacatggccatgaacgcggtcgcaaacttcagtcttccaatgacgccgatgtccagcatctcgtcctttctccttgtttttatccattcgccgccacggtgtttgtggggcggctccaagtcgttgcaggatcggcatgtcagtggccgatcgtccctagatatgggcaattcacactcctcaaaaattgattttctaaattctgttcatagcgtctatggatatgcggagctttgtgcctggtagggtcgcggcctgtgtcgctgtacccgttgtcactttttctggcggcggcgatgacgtggatgtcgaccagtgtcgcaaagtcttccttcgtcgctgacaagcgtcgacgggataaccagtatcaggaaaccggtcatcaactgttcttgcgccttttccgcacagccggcgaccgcctcggcaatgagcgaggccggatcgataagcactgcccgcacccgactgcatcacattggtgaccgcgaggtggacggcaagtaccaaagtcgagaaggtcaggtatcaaactcgccttgccggcgatgggaccaaccttggcgagaccggttatgcctgcgatctccgtcgcgaccttcaggaagatcaccggtgcaatgatcattccaagctttccgatgtccggatagaaatatccaaacaggatgcccgcgatcgctgccagaacctgggcatagagatggcgatataagggtggcttggcgcgggtctccgcggaatgctcaatggtcatcaggagatcctccatatggggcgcgcccggtcgcctgccaagccgattctccgaaaaccgacagcggcgactgtcatgtgaagctgatgagcaatgaccgtgccagttgccgttaaaccgcagatcctgacgcccgaggtgcttactgttctcgacccgaccagccccgccatcccggtaaccggccacggcgacatactgatggtagtgcaggcgattaggacgacgcctctgacattatcgccaagctcttcgccgccgacgtgatccacgaatttgagtgcgcgaacaccatcggtctggcacgacgggactgccacctcaccgccttctgtccataattctcacctttgtctcaaggcaaaccttggccggcaagaaatgttatttgcctccatcaaatgaccgccgagacatcttaatcggcctccagccaaagtccgcagccgcagcatcgattatcgataaagacccgggtggaggatagcgagatgacagatttttggcgccaccgacagaactggcacaaatcttgaacctgctcattgcgaggcggcggagctgctcattgcggcaacaatcctatgcctcgactgcgccacgtatgaagatttcacaatactattcaattgagttcttgcgacaaatgggcgttgacgatgtgcaagatggtcgccagagccgccgtaacgagaggaaagcgaaatgtccaggaccgcagaaaagcccttcgaaactgtcgaaaactcgatcgtcggtcaatccacggcaatcaataggggcgagcaattgacgcatgctattgagttacaggagctggccggatccgtcttcaagtcaacaatgatggtgggatttgaactgtcgctgaacactttcgctgcagtccaagccaacaccttcgctaatttgcaccatcttagcgagtttctcggggcaaaatcgccgtcccaagttttcgacctacagtgttccttcctgcgcaagcgtatagacatgggtgtcgagcaggtcaaagaatcccaggcgctcagcaccaaggctttgattgatatgtcgaagccaatcaaggaattctttgaaaaggctatagcagacctcaagacggcctgatcgtcagcgatccccgccgtggcaggccgtgacccgccacggctttgcgctcagtagcctggagtaccattcgatgatttccgccgatttgtcggattgatgacatcggcttgtgttataggtggggggaaatcctggacgctatctacggcttctttcgccctcctgcaggaaggcggcacctccccattgcgcattcagggatcacatcggccccaaggtttctgctccggtctcttgtgcgcaccgcagcgcaggtccttgcgcacaagtagtcacgttgatcttcattcagctccctcgacgtctcgaagacccaaccgcgcaacatacaccggatcacgaatggacgtcgcgtaggccgcggctcacgaaaggcagggatgttgaactgggacgacttctggcctcgcctgacgcgtcctaatagggaccacaccgtcagcgccggccgaatgacacgtggcaccgcgacctgcacggcgcctgatctgcaaacgaagcgactatcaagttcgcaacatctatcctggccgcccagcgcggctgtcatgaatcgtgggacactctgcaagccggcttcagcacagcctggttcgccgagcaccacttcgacaactacagcggtccgtcgcctttgtcgatcgtgacccactgcgccggtttgactacgaccattggcgcgtcggacgctttcgacaattgtttgtgaaattgtcggctccgcgacacaggcttgcttctgggtcggctacttctcctaatctaagtagctgtaaaagaaggtaaaccagcttctgctgggctcaccctcctcgacttggcacggcttttgaagccttccttgtgcaggcggcttgaagctgccgctgtattcgtgttgcgggcaaccgcgatggtttcgaacaacgaaggaaagcaacatggcaggtctgcgtcaaatcgcgttttacggcaagggcggtatcggcaagtcgaccacctcgcagaacacgctcgccgcccttgtcgacctcgggcagaagatcctcatcgtcggctgcgatcccaaggccgactccacccggctcatcctcaacgcgaaggcgcaggacacggtcctgcatctggcggcaaaggagggatcggtggaagacctcgaggtcgaggacgtgctcaaggtcggctacaagggcatcaaatgcgtcgagtccggcggccccgaaccgggtgtcggctgcgccggccgcggcgtcatcacctcgatcaacttcctggaggaaaatggcgcctatgacgatgtcgactacgtctcctacgacgtgctgggcgacgtggtgtgcggcggcttcgcgatgccgatccgcgagaacaaggcgcaggaaatctacatcgtcatgtccggcgagatgatggcgctctatgccgccaacaacatcgccaaggggatcctcaaatacgcccattcgggcggcgtgcggctcggcgggctgatttgcaacgagcgccagacggaccgcgagctcgatctcgccgaggcgctggcggccaagctcaattccaggctcatccacttcgtgccgcgcgacaacatcgtccagcacgccgagctcaggaagatgacggtgatccagtatgccccggagtcgcaacaggcggcggagtatcgcgcgctggccgacaagatccatgccaattccggccagggcaccgtcccgaccccgatcaccatggaggagctggaggacatgctgctcgatttcggcgtcatgaagaccgacgagcagatgcttgccgaacttcaggccaaggaagcggcggcagcggcccagtgaccgccgccgcagacgctgcccgggacggtgatccggtgcgacattccaccaatggtgcctcttcttggaggacacgcaaaaaagggggcaggcccaatgagcctcgattacgagaatgacagtgcgctccatcaggagctgatcacgcaagtgctgtcgcagtacccacacaaggcggccaagcgtcgccaaaagcacctcagtgtcgcatcggaccgcgaggcggtcggggaggagggcgagaccctctccgaatgcgacgtgaagtcgaacatcaagtcgatccccggggtgatgacgatccgcggctgcgcctatgcgggctcgaagggcgtggtctggggcccggtcaaggatatggtccacatctcgcacggcccggttggctgcggtcaatattcctggtcgcagcgccgcaactattatgtcggcaccaccggcgtcgacaccttcgtgacgatgcagttcacctccgactttcaggagaaggacatcgtctttggtggcgacaagaagctggaacaggtcatcgacgagatcgaggagctgtttcccctcaacaacggcatcaccatccagtccgaatgtccgatcggcctgattggcgacgacatcgaagcggtgtcgcgcaagaaggccgccgaacacgaaacgacgatcgtgccggtgcgctgcgaaggcttccgcggcgtctcgcagtcgctcggccatcacatcgccaacgacgccatccgcgactgggtgttcgacaaggcggacggcaagacggacgtcgagttcgaaaccggtccctacgatgtcaacgtcatcggcgattacaacatcggcggcgacgcctgggcgtcgcgcatcctgctcgaggagatcgggctgcgcgtcgtcggcaactggtcgggcgacgccacgctcgcggaagtggagcgggcccccagggccaagctcaacctcatccactgctaccggtcgatgaactacatctgccggcacatggaggaaagatacgccatcccctggatggaatacaacttcttcggcccctcccagatcgaagcctctctgcgcaagatagccaggcatttcggcccgacgatcgaagaacgggccgagagggtcatcgccaagtaccggccgctggtcgacgccgtgatcgacaagtactggccgcgcctccagggcaagcgagtgatgctctatgtcggtggtttgcgcccgcgccacgtcatcaccgcctatgaggacctcggcatgcagatcgtcggcaccggctacgaattcgcccacaacgacgactaccagcgcaccggccactacgtgaagacgggcacgctgatctatgacgacgcgaccagttacgaactggacacgttcatcgagcggatccgccccgatctggtcggctccggcatcaaggagaagtatccggtgcagaagatgggcatcccgtttcgccagatgcactcctgggattattccggcccctatcacggctatgacggcttcgccatcttcgcccgcgacatggatctcgccatcaacaatccggtctgggatctctacgacgcgccctggaagaaaatgaccgtgccgacggccgcagttgcagccgaatgatcggccggtcttgcgcggcacgaggaccgcggcaagaccggaaacctctcgaacatccctgggcctaagaggccagatcaagaaggtcaaacaccatgccgcaatcggctgagaagatactcgaccatgcgccgctgtttcgcgagccggaataccggcagatgctcgcggagaagaagctgaacttcgaatgtccgcaccccgaacggctcgtcacggaccagcgcgaatacagcaagggctgggaatatcgcgagaaaaacctcgcccgcgaggcgctcgtcgtcaaccccgccaaggcctgtcaaccgttgggggcggtgttcgcagccgccggcttcgagcggacgatgtcgttcgtccatggcagtcagggctgcgtggcctattatcgctcgcacttgtcgcgccacttcaaggagccggcttcggccgtttcgtcctcgatgaccgaggatgcggcggtgttcggcggcctgaagaacatggtcgacgggctcgccaatacctacgcgctctacgatccgaagatgattgccgtctccaccacctgtatggccgaggtcatcggcgacgacctgcatggcttcattgagaacgccaagagcgaaggcgcagtcccgcccgaattcgacgtgccgttcgctcacacgcccgccttcgtcggcagccatgtcgacggctatgacagcatggtcaagggcatcctggagcacttctggaagggccaggcgcgcacccaagcggccggcacgatcaacatcatcccgggcttcgacggcttttgcgtcggcaacaaccgcgagcttcagcgcctgctcaccctgatgggcgtgtcctacaccttcatccaggatgcctccgaccagttcgatacgccgtccgacggcgaataccgcatgtatgacgggggcacgacgatcaaggcgctgcgggcggcactcaatgccgaggcgacgctgtcgctgcagcactacaacagccgcaagacgctcgaatattgccgggaggtcggtcaggccaccgccgccttccattacccgctcgggatcaacgccaccgacgcgttcctgatgaaggtgtcggcgatttccggccgggaaatccccgagacgatacgcctggaacgcggccggctggtcgacgccatggccgacagccaatcctggctgcatggcaagacatacgcgatctacggcgatccggacttcgtctacgccatggcccgcttcgtcatggagaccggcggcgagccgcggcattgcctcgccaccaacggcacggcggcctggcaggccgagatgaccgagctgctcgcctcttctcccttcggcaagcaggcaaaggtctggccgggaaaggatctctgggccctgcgctcgctgctcttcaccgagccggtcgacctgctgatcggcaattcctacggcaagtatctcgagcgcgataccggcacgccgctgatccggctgatgttcccgatcttcgaccgccaccaccaccaccgctttccgctcatgggctaccagggcggcctgcgcctgctgacgacgatcctcgacacgatcttcgaccgcctcgatcgcgaaacgatgcagacggcggtgaccgattattcctatgacctgacccgctaaaagcggcggtcggcaaaacgccggcccgggaaccgcaccatgggatcgcgagcgttgaaatgggctgatcgtttagctcatgcgctatcggaactgcgctcggaagtgcattcggacagccaccttatcattctaaaggggcatagcggcatatgaattttgcatggagagagacagacggttggtagtattgccggccactcacgggatcgcctcgattaaagagggcccgtgcttcaggacgaggactaaatgatgacagcgttatctgatccccggtttactcgagctgtcagtgacgatggatcgttggccacccctttcatgaaatgcctcgcgcggttggtccgcgctcatgattcctacggattatggaaggataaatgtgacgccgagttgctggccaacttcacagttacggaggagcagcggcgagctatccccgtcatcggcgaccccgagccagacgtgctgttgaggctcgaccttttttacgccgccgtcggcgtcgttatcgaggagcgctcggggcttttgatctcgcgaacgctggagatcagcgatgagggcatcggccgagtgctcttcacaaccaggcggctggtggtgctgtcgaagaccctacgtgacgttcaccggttcggcttcaatacacttggcaaatgcgccaagactggcacgaagttggtcaaggatgcgatcaaaagcatcgaaacttatccggacgtggcgcgggcataatgtgcctgcaaggaataagaccatgacagatcttgaagaactcaagcagagggttcaaaaactgcagtcacgcgctgcgactgcgaagacgcaattgcatgaccttgccgagtgccttccgaactattggaccgaaatagtggccgtcgccgaaaaaacattcgacgcttttgctcagttggacgctgccaaaagagaactcgccgcgtcggagaattcacgatgaaaagctcgttcgtgacccgccgcttcagctggtgccggaatatctattatgcatcggctgcggctgctgactcggggcgcgaggtatgcaccttcacgggatcaatgacgcaggtgaaattctcggtgttttgcgacgccgaggacgatcattccagcaaccagatcatgtgatcatgtccggcgacagcgccggccgctgtatcggctgcggagccggagtgcgtgtttacccaaactgccagaatcatgttgcggccgacgacattgccgcatgatcccacaaacaaaccaggaaaacggcgttgtcttttggtatctttcatcgaattctatggctgttcctgtgcgccaacactcttatagtctacctcgtaacggggtccatcagtgacgcagtcgtcacgactatggttggttcgctgcttctgcagctaacttatttcgcaaacgtactctttctgctctggcgggctcactgcgcccggagagctcgtcaaacgaccgggcaattccatggagaggaacagccgggggaccctcgtatagcgggcactcacgggcgcacggatggggatccgtgcttcgaggacgaggactctcgataggccccttgctaaccgcttcatgaaatctctctcgtgcggctaaatccccgctcagctttgctttcggtgtgcaaggacaagtgcccgcgctggatttctggccgacttcactgtcaccgaggaccagcgccgtgcgaccgcgtcagcccttgaagcgcggaacaagagagtgcgtaagctgcagccgttctggaaagcgaacatggaatttgcgtaatgtcgccaaggaccttccaatcaatggagctgatcatggtagtcgccgagaatacgttggcgcctttgctcaggttagcgctgccggattgctgcccgacggcacaatctggggaatgctaccgcttcagatggtcctacattgaatcttactgtgggttctccctacagatgcgccaccttttaacataatcttgacgatagtgaaaagtgatgctggatctgacgaatgcgaagcgcataggaatcatcggcggcggcattgtcggttggcttgcagcgatagcgcttcgccgtgttttcgacgttgatgtcgatgtaacggtcatagaggctccgacggtgtttccgcttggcccaggggaggggggctcgctcaacctgattgacacgttgtgtcgcaatgagctcgacctggacgttttcattggtgaagccggcgccacccacaagcttggtgtgctctatgaaaattggaggggtggaggaatcccggatcgctactaccgcatgttcggcggatcgggcataccggaaatcgaatgtcgcgtcggcggtttcttccctctgctgtcggcgagaattgccgcaggtgagaaccttcacacgtgcatccctggctttgagttaatcacaaagaaggcatcgcaagtggaaatcgacgagttgctggcaaccggtgagtctggactctacccttcgtttcacttcaatcacgccggcttcgagcgatacctaaggcgcgtcgggctggcacgtgggatcacttctcgtagggctgtggtacacgggatgagactcgacgaccgagggcatgtaaacgctttccagctcggaggcgaagaacttgaagtcgacttcgccgtcgatgcgtccggatttgccagattgggtctcggcaaagtctttaatacgcgctggtgttcgttcgcaaatgtgctgcctactgatcgtgcgatcatctttgagcttgagccgcggggatcatcccccgttacccgtgccaccgccatgaaagccggatggatgtgggaagccccattgaatcgctcgatcagtgccggttatgcattcagcagcagatatgcggacgctgcgatggcaatcgccgaggttgagaatcactatggattccgtgtggaggcgaaacacgagctttcgctggatcaaggttacttttcgaccgcatgggttaacaatttcgtggctttgggaacagcgtcgggttttgttgagcccctggaggctgcacttgccgcccacaccttcgaagcgttaaggaatttggagcgcattctcgccaacggaagcggcattgtgcccgctcgggccatcgaaggctataacagcgcaaacgcacggtgctggacgggtgttcgggacttcctgaggctgcactacgattccaagcgaattgacacaccgttttggcgagatcttgccgcagccgagttgccggaaggatatgccaacctgagggcttgcttccaaaaacggacaccacgctttatcgatatccaaccgtatgtcggaagcggatggcagagcctcttccacgaaattgattggatttcagtggcggtccctctaggagtagtgccgcaggcggccgcatgcgccgaactacgcaggctctctacggaaagtcgaagtgaggtccaggcctatgttgatcggctgaagggaacaatagccaagatcagcagcacgaggggatacatgcactaatcgtcacacaaaagccactccgcggccgaagccgtgtaccagggtcttgcttcatgatcatggcggagcggcacattgatcgtgagcagggtgtctcaaagccggtcaaatccgcggctgcgaacgactagggtcgatattccactgaatcacgcggagctgtcatgtgcaacgcttcctgtagtagtacctgccgcatccagatgctcgcctgatccctgttgtgtaggctaggccactggacagcttgggcgaatggtggaagtgccagtggaagttcggcgacccgcagcggcgttgtttttgcgaaatgttccaccagccgcaacggcatggtcgctatgcgatcggttcccgacagcaaaggcgggattagactaaatcccggcacgacgacttcgatacgcctcttgagaccgtgctcaagcaacaaccaattctcgatggagggctttagcgtacgtccgaacttagccgcaatatgacccatcgatccgtagttttcgaaagaaagctgccgttttaactgcttgttagtggggcaacctacgcaaaccagcgtgtcgtcgagcagtttcgcctttggatgatcgctcgacgcgaacaattccggaaggatcacgaaatcgacgtcaccgtaccggagaagttcatcgggatcctcagtgagaggcagcaactcgaagccgatgccaggcgcctctcgcgccagccgcttcacgactctttcaaaaaacaccagcatcatgacgtcggaaagcctgatcctgaagcgtcgctccgactgaactgggttaaacatatcccaagaaatgatggagaactggatgtgcagcagagcatcgcggactgcgggggcgagcgctatcgcacgcggagttgggataagttcgcgacctcgcatcgtgaacaagtcgtcgccgaaataggtgcgtaggcgggcgatggcggcgctcatggccggctgactgaggttgatactgcgagcagctgcggtaacgcttcgctttgtcatcagagcatcgagcgctacgagcagattaagatcaagtcccttaaaacgcattatataattcaaccaaagcgtttctgccctcatagaacaggtagttttcagtgatgttacagagtgagcgccgttgccttgttcccgctgctcagaagaacatgagggagtggagcgcactccgtcccgagtaccgtaaagagcgggactatcccaccacattcgacacaccaaatgagtggtgcgttgcgacaaaacttcggcttgcagaggcctttccagcgtgctgatgagaatggagtgcaacccggaccccggcactttcgggagctgacgtcggtgaccagctgttccccgataacagagtgaccctcggttagcctgttcttcaatgcgatattggttttgcgggcggtctcaatttcggacgtggtttccaatctgctgggggcatcagtggctccgggcagtccgcagttttcgagccgatctggcacgcggctgtggaactcttcgcccatcgcctcaatgaaccattcctgcgtgccagcaaaggccttgagttcgaccctctttagcgacgccgacctcctcaacccgatcgacgcgtcgggttaatgtctcgacagcaggatcaggagaggacaccggttcgatccactgcgacccgcccaggatcacattgtcttgtgcgggcgtgccgcctggctggaactttcctgagtgcatcaatggcatccttctgataatcagacgaagcgatggcggatactagtgccgcatcgacccggtcgcgctatgcaaagttcatatcccgccatgcgcttgagatatggttctaaactctttgcaggatcagtgctgccagccgaacagtcctgacccacagatggagtaaaacgaccgacctctcactttcgcagaggacgaatagctcctgattgaaccttcaggagcttgacatcgcggactgcagacggcaggcgacacacccgcgaagcctttttgtatgccagcttgctcctagtttcttagttcgccgcgaatcgcctcacttcaaccgcgtcggaaccaaacgttgatccgatgtgatgagccattaatgccagacgtgccccactccacattggtttccgaagagcaccattaaatctgcgcccaatatctactgctgctgttaatcagcctggctgacagaaagctgacgcggaggggttagggcgttgttcatgtacatccacaaaacttcctccagcgaatttaggattgggtaatagtcattcgcgctagtgtgttctggatgtccatcagtgttcgtctcgcgatccttgatcgaaccggagctcgccgttcagcctgagtggttcatgtaacggcaaagcagtgtgcgacgatagctcgacccccgaagtaaatgtagcgaaatgcatccatgatgcagatgccttcgatccgaagaatcgatttgctcaatcagtttctcttaaggcaaaggctgatctaatgaaggtgtaagggatatcaatgcgcagagaaatctcaggtgtatttttggcatcatgggctcgccgaccggtgtatttctgctcgtcaacagaccttcgcccccgctatcacaggtgtttgggttacatgctccttcgattagccctcgcacggagcgggtacgaaaactgcgatcagtcgcgcggtactgctgtcaccccggtcatagtccgcggtgacgtgctcaattggctgtcctgccttgataggagaatgaaatgcgaacgttgctcgtggatacggatcttacccgcgcggtccgaggcgcgctcggtgacggcggctttgccgttgatgtagttggcacgctggaacaggcgtcgagcgcatttttttcagcgagctatgaaattctcctgctggagttggtactgccagatggcgatggactggattggctgaggcagctaaggagcgacgggtattcagttcctgccgtcattatgagcaggctcgacgatctcgagaaacgaatttcggtattcaatagtggcgcggacgattttctccgtaaacccgtctctacggatgagctcatcgccagaatgcgggcccttctgcgccgatcgacacagatcacttgccccatcattgaatttggcaacctccacttcgatccgatcggccgacaggtgtcggttgacggtcatccgctaatgatcgcacgtcgcgaactatgcattctagagcatctgcttaaccgcgcaggtcgcatcgtgccgcgtgcgcggttggaagatcaactctattcgttcaacgacgaagtttcaggcaacgcgcttgaagccggaatctaccgcttacgcgggtatctcagtaggtcaggtgccacgttgcggatcaggaccgtgcgcggcattggctacactcttgaattgactgacgcgtcatcagcatagtcgaatttgaaggaaggactgccttgaaagccactccaactggtcatgctagcgccgatcgatggccgacccccatcgtcggttcaaggccaactgttccatactggagcaatcttctctacgcgctcgttctgttgtctcctatgtccgccgctgccgaaaacaacggggatgaagcggtgcctcgtgccgctcccaacagcatcaacgccacgctgaacctttcctcttcgctgggcaagacagttcatttgcccgcgccagccgcgaccatctttgtggccgacccaacaattgctgattatcaggcaccctccaatagaacgatcttcgtctttggcaagaaatttggtcggaccagcctattcgctctggacgaaaacggcgaggctctcgccgagttgcatgttgtagtaacgcagccgatcgcagatttgcgtgccatgttgcgagaccaggtcggcgactacccgatccacgtcagctatacgccacgcggcgcaatcctcagcggtacagcgcccaatgccgaagtcgttgacattgcaaaaagagttactgagcaatttctcggtgacggtgcgccgatcgtcaacaatatcaaggtcgccggctctttgcaggttaatctcagtgtgcgcgtagcggaagtctcccgcagcggtctgaaagcactcggcatcaacttgtccgcgttcggtcaattcggcaatttcaaggtgggtgtgttaaacagaggtgctggacttggttcggcaactggtagcggcggtacagcagaaatcggattcgacaatgatgctgtcagcgtcggcgcggttctcgacgcgcttgctaaggagcacatagcttccgtcttggccgagccgaacctcactgctatgtcgggtgaaactgccagcttcctcgccggcggcgaatttcccattcctgtcctgcaggaaaatgggcaaacctcggtggaatttcgccgcttcggcgtcagtcttgaattcgtaccaactgttctcgacaacaacctaatcaacattcacgtaaagccggaagtcagtgaactatcgttacaaggtgccgttcaagtcaacgggatcgccgtgccggcagtttccacgcggcgtgccgatacagtcgtcgagctcgcgagcgggcagagcttcgtgattggcggtctcatcaggcgtaacgtcaacaatgatatcagtgcatttccctggcttggccgaataccgatccttggcgctctgtttcgttcgtcctcgtttcaaaaggaggagtcggaattagttattttggttacgccttacatcgtcaggccaggctccaaccccaaccaaatgagcgcacccacggaccggatggctccggctttgggcactccgccgcgagcccgcgctgctatcagcaccgacgcgccaagcgtcaagggcgatctcggcttcatcatcgaatagtggtgccgaatgacgttgcggatcatagctcacctgctcgctttgacagcaagcttagcaggctgcacaagcactgcaccgatctatgtcgagcaaccgacaccgatttttgtccgacaggagtccaccgtcttgaagttggagagctttcacgcttccgaacagcagcgtcttcttgccttcctatggaaggccagtcgcggccggagggatgcccttcacctcgttatcagcgggtcgtcccggctcagcgcagaggcggtccatcaagccagacagatgggcatcggcgcttccaacatccatttgcttgaccaaaatgaccgcgggcacctgcggatagaggccgttgtctatcatgccctccctccaatctgccggtcgctttccagccagttacttaatgacgaattcttcgaccagccgatcggctgttcgacgagccataatctggcagtaatgatcaacgatccgcgcgatttgctcggcaatagatttgtcaagcccagcgatggtgatcgggcggccataccagttaccacctacaggacctcgacgggtaaaggtggcttatgaggcatgaacgcgactgttctcgatgatcgcttcatccgggttgggtgtcccctcaactcactcaacccgcatgagcggcgcggcgctcccgactttgtttaccgcggttgcagtcactgagaatgtggcgagatcggatgggatcacttgccggtgtgtcagtcggcacggaaattgttgagcccctatcggcgcttgtgcacaagcaagatcgatcgacgcccagacagccagttagagggtcggtacgtcagtctcgccgatacgaagctgagtcgacgtgtatataggtctgactgcgtcaatatcttggacgcttgtaacgtttggcgccggtcagacgggggtgctaagaattcctgcccctttcagggcatacgctgtgcgcttcgatcgtgaacgcctactctgcaggaaagcccgcacccgagtccgcagatcaaatgtcaaaatccaccgatggcctgatgcgaatgactccctcgcctcggaattcggcaacgtgccgcatgcccatcatcaaaaacgttgttgtcgggacctctgcggttggcattagccccgtggccctcagcatgctcatctggtcttctgaggccatgtgaggagctaagaaccagtggtcccacgcacgaacgccgctatccataacgaaatcagaaagttcagccggctcggcccctgcggacgaggacggccaagcgtgcgatggccgggcttgcgacggtccagagtgtgatggtcccacctgccacggtccagcttgcggccccgcggcatccacgcgctgccatatcaaatcctgatcgtattcgggcacctgcagcgcgcgagcatgcggttgctgctcgctaggctggggagaccttcccctctcagcggtcagtggcgcgggagaagctgtagcccgcgtatgcaggtcctgctgccaatcaagcaatgacggattcgcccaatccaaatactgcgagtagggatgcttggtttctaagtcggtggcatgcggcggtgggcttgggttcagtggggtggcggacggggatagcccggcttgcgacggtccagatcgtgatggccccacttgccatgatccttctcgcggtcccgcggcttccaggtgctgatcctggtcgtgttcgggcgcgccctgtagcacccgagcatgcggtcgctgctcgctaggatggggagacctttccctagtcctggtatacaggtcatgctgccattcacaaggtgatggataaggatatgccgaatccaaatactgcgagtagggatgcctggtgtccaaatatggggaatcggcttcaacctgcggcaatagtgagtcagcggcatgtggagggctatattgaaatccgctcagctgatgcgcaaatgcactcgcgttggcgggtggtggagagtccggctgtgggcttgcgtttagtgggctggttgaattgatatccatcctgtttctcctttgaaatatggaggccccaagcctttccgatgcggaggcggcatcaccatctaatccgccctgcaattgttaagagacatacctttcgagaagctgacaatcagatggaccgaatgaagaccggacttatgtccgctcgaacgtcgcgtcgctggcgaaggccgttgacagatccaggatgatagagacaacagctgtcaacatggcacgcgccaagagacaatgtttcaacacgatatttcttctttagcgacgtgattggcgcgccttcagccacaggccgagcgccacgagaaaagacaggccgtagaggcccgtgacgagcgggaaagctgccttgagcccaaaccgttgcgtggcggcgactcctgcaatgatcccgacgaccgaagcgccctgctggcaggtctgcgcaagccccaggaccgatccctgcctttcgcttcgcgtcgcggccgagacgagcgacaggagaaccggtgtcgttcctccaagcagcgcgccccaggtaaaatagagcgctgcgaacagccctatcgcacgggtcgagccagcgagcccggtggcgacgaagcatccgccagcgatcagcacgttacatccgagcacaaaagacggctctcgcccttcgaaggtccgggcccacaccggcgctgcgaccacaaagccgagcgcaagaaggccatagctcaatcccgtgatccaatgctgagagccgtagacctccgacatatagagggaaaagggcacctgcagcaccatcctgctcgcaagcagcaatcccatcagagcaagtagtccgaacacggacacccccgtggaaggcgcgcaagagactgttgttgctttcgcggttttcgtgagtcccgctcctcctagtggaaccggcaggcttgtccaggcgactgcggcacagaatgcgcagatcaccccggcggtgaggttgacggccgcaaaaggcaaggcgtcgaggatgagcccgccgaggaaagcgccgcccagggagccgacattcgtcgccacctgcagccaggcgaagaggcgggcgcgatcgcgcccgccggtgacctcaacgccgtaggcctgggccggagcgatatagccagcgcaggccccctgcagaaagcgcaacgccagaatggtccagacatcctgggcgaaggcgacgagcagttgcgtgatcgccaggcccagcaaggcccggaccatcatcaggcgattgccgtaccggtcgcccatacgtccccaaaaggcactcgtcagcgacacgccgagcatcgggcagacgtagacgccgatacccgcgaggccaaagacgctgtccgaggggctcaatgccttgatctgaatcggccagaagggaccgttcatctccatggcgcccatggagatgaattgaaggccgaacagcagcgcgaagaccggtccgaaaccgcgcaggaccgcgactgtcctggtcattccgcactcgccaacggattgggcaattggtgctcgatgcggtagtcgcgatagcgctcgagatgcatccgcaggaccgagcgtgccggccagggccgttcgaggaaggcctggcgttcctcgagccagaacgcatccgagagcatgcgcggccgcaacgtctcgaacgcctcttccgtttcttccctgaggacgcgccaaaggctgtcacccgcaaccgaatattgctcggtcaggcaaagggcgatctcgtgaagatggcagacaaagcacgcattgatgaggaacgagcgcacgaggctgatatcgtcgtcgaaggtggttggcaggatgccccctcgactgaacggctgcagctcataaccgcgttcggtgaagagcggtgcaaaactgcggccgtcaccgaaatcgcggatcaagagcttccgtggcaggccgcgatcatcgaaaagaatcgtgctgttttgttgatgcgcctcgaatgcaatgccgtagaggagatacatggccagagtcggtcggacaacggtgcgagcatagagccggaagaacgcagcgatcgccgcttcgctctcgtcgccgctttttccgatgagttcgcagatcagtggccggccgtcgacagggccagcggtcagaagcgcggcgacggttaccggcagcaagccatctcgacgggcaagagcatcggccttgcgatagaccaccgaaagaaagcggccgagatgctcgtcgccggtttcgggatgacgcagaatcgccccaagctcttcagtaaggatctccagcctgcacctgaggtcatcctcctccgacacaatgtcggaaatcagcgtgctgaggcgcggtcccatatggatcgacttcgcctgcagcgtccgctgctcgctcgtcatccagatcgcaaccggcagtttgatgaagggtcttggcgcctcggtcgtcggcagcatcgtgcgaaacgacatggacggcaacgtcacgatctccgggccgtcaggatcgaaaatgccggcttcgatctctgccgcgaattcgcggcgcacgaagtgctccagatgccaggcgtggacgggcagaggcagccagtcctcgggtgactggccccgcgctttcaggccctccgcccaatcgcgcgagaggtccgggaagttctcagcgaaccattccgaatagcttccgacgtgcggcatcttctcgacgtaggcccagctgctgcggagcgccgcaatgcgcaggggcacgcgcgcgccgaactcgggggacagtgcggcgacctcctccgccgccaggccgggcttggccttccaggtcggatagaacgggtggccttcgagcgcgccccattggtcgagggtcatcgcggccaaatgcgtcggcaagcttctttcgagataggcaaggaagccgggcgcaccggcttcggcgatttcctggcgcagcctggcgctccagcgcccgcgctcgcggcgcgccagcatgtcgttgcgcatgctgttgtccacgtcgcgcagcagatgctccagtccgtcagaagcgggcgtgatcgcgagagaggaggcaacctcccgcatcagggcggccggatcatcgatccgctgccgtgccccggtgccgtccagcacttcgatctgtccgcggttccgcaaggttccggcgggcgcgaggctgagatcggtgaagtgcagcatgcgctgcgagggccagagggggaaccaggcctggcggccttcgcgtgcccacagcaaggcgttcggcgcgagcaggcgctcggcgaacaggcagcgcaccagccggttgatcgcgttgcgcgatgcctgcgtcaaaagcgcaagatcctcgttctcgacgggattcgtcacggagggcgtcttctcgtccatcaggcggcctccggccagtcggctgggacatagtctggtgtacccgcagccaatttgccgtggtagtcgcacgcccagcgatagatcttggcgatcgccggtaccgtcgcctcgagccgttctgccatcgtgacgagcagcgcctgtccgaaagcgatatcctcgtggaaggcgcggcttccgcgatcgatgacgagccccgggccatgtggattgggaacgaggggggcaggaatgcccgcataggcgcgatttgtgcgtagaagcgtgtacatggttcggtcatccccaatctggtcgccataggcctcgatcagttcctgctgaagcggcttcactgagctgagatcaatgccgagacgtgcctcgctcgcccggcggatcgcttggttttccgcatcgcaagcttccaggagctcggcgcctgcttgtgggcagtcgctccaccagcacagggcttcgtcgaacggtcttttttcccacggtgcgccggggccgatgagcgcgtagagcacggccgggtgcatcagcgcgttgcccggcgtcagcgtgatttcgagatagtccttgagcaggttgacgggcgcctcgtagatgtgattcaacatcgccatcagtgcggcggcgctcgcagcgctttcccggcgatgcagggcaacgaagagctctgccttggcgccgcccatccgcacgcgctggcctgcaatcagatcataggcgatatggggcacgtccttcatgccccagatcaccacattgtcacgccccgaaagcacctttgccgcgagccagtcgaagccgcaaaagccgggaatcgcgccgatatagacgctcttatccgtcggcaaatacggcgctatacgatgcaagagcgcggatcttgcctgggcgggttgcgttatgaggaccatgtcagcgttgtcgagcgccgcgctcgggtcggttccgatgtagtcgggcctagcactcagggtgcgaccgtctcgcgtcaccgcttgccagagaccgtccccgctcgcccatcgcgcggccacggtggcggacgtggtcaggaccgaaacatcgatgcccgggttctgcttgaaaaggaccgcattcaaatgtccggtgcggccagcgccgcaaatggtcaccttcatgctgcccgcgcctttccgaatagccagccatccaactgggcagcgattgccgggtcgagcaggcggcgcttcgccatccattcctcatcgaaaatcgtgccaagatatttctcgccgccatcggcaaccgtcgtgacgacggtgccggtgagcttgccggcgccaatgaactccagcgccttgtagatggcgccgccggtcgagccgccaacgagcagtcccttgcggcgggcgatgtagcgcgccgtctcgaaggcttgcgtatcggtcacctgcacgccttcgtcgatgcagccatagtccagcaccttgccgacctcatcgccggcgggcgtgcccgttcctgactggtaataggggtgccccggcttgccgaaaacgatcgagccggccggctccacggcaatagtgcgtacggccggattgttacgcttcagacgctgggagattccggtcatcgagccgccggtcccgacgcagccgacaaaggcgtcgatgccgtcgggaagctgggcaaccagttcgtccacgaggccggtatagccttccggatttgccgggttgtcggactggttcatgaacagcgcgcccggaagctgcgcgccgagttgcgctgcgaggcgctggcgctcgacgactgcgacctcgtcttcgcgaaagtcgccttcgacatagcggatctcagcccctagcgcccgcatcatgcggatcttgtcgggcgctgcatggtggtccaccacggcaatgaagcgcagcccgaattccagcgctgcgagcgccagccccgtgccagtatttcccgacgatgattcaacgatcgtgccgcccggagggaggcgcccatcctgaagggccgcaatcaccatgctgcgagccatacgatccttcatcgagccgccgggattgttcttctcgatcttcagaaccaaggtggcgttgcggcccggcacgtcgatcgacatgaccggcgtctggccgatcaattgtgttacggtcgtgtgcagcatctaaacctctccaattgtgtcgggaacgagattgggccgcccttcggcgtcttcgatgacgcagaagcgagcgggcatgggatggcgatggaactcgttttcgaggaggtccatctggtagccgccggtgttggcgtatacgagcaggtcgccagcgcgcggcgcggtcgggaacgtcagccaccggttgctgatgacgtcctcgtcgaggcagctatggccggccagataggcgcggaccggcggcaattgaacggtcgccttggtggcaggcacgagaatagggtcgatcaggaattcggaggcgaaccaagtttcgcaggcgctgaagctgctaccttcgacaaagatgacgtgcgaatccggaccgagcgccttcacccgcgagattcgaaagacagtgatcgccgcctggtcggccagcgcgcggccgggctccatcgccagcgtgagaccctcacgcgccaggtagccggctacgcttcggccctggttcatctccgcctccaagagccggtgcagccagtcggctgctgaaagagtgctgccatagggatagaaagagtccggtattttcccggtgcggtagtcctcgggcgcctgcgccgcgagatgcgctttgtacctggctcggtcgacatattggataggcaggccaccgccaatatcgatcatgcccggaaaaaatcccatccgcctggcttcggcaatgaggtcggcggcctctctgagcgctgccacacgggtctcccggcgatagccgctgaggtggaaatgcagcccgtcgaaacgcaccctgccttcaccggcaagccgagcgaggcaatgaacgaccgcgtcgggcggcatgccgaagcggctcttgctttggtccctcggccgcaaacgcaagaggatggactgttggccagcatctgccggcagaccgtggatgagatcctccagttcttccggcgagtccaccgatatcagcgcgttgcaattgatcagctcttgatgaaatgcgctcgtcttcgccggtcccgtcgccacgagcctggcaccatcggccccaagccgccttgcgtcgcgaagctcgtagaggctggagacgtcgagcccggcgcctgcgctgagcgctgcctgcatgagcccgggcgatttgttggccttcgccccgtaatagatcgcatgctcgaggcggcgctccgtcagtacgcccttcaaggcggcaagattctcccgcaacgcatccggccagaccagattgagcggggagccgtggcgggcggcccaatcgaaaagaagaggaccgtatttggtgagaaggtccgcagtcgccgatcgcagaatcggtggcagcccatggccgatcttctggcaatgcagcgtcatcacagcgcccccgcggaaaagaccggcgcgatctccatcggagtgggactgctcaaaagctcaagcggcacatcgcatgtcggcaagccgtgggcaaaaacgtgccgggtcgtcttgtagggaaacttgcggccgctgcgcgccatcgcgaagatttcagccggagtaatgttcccacctgggcgccaactctctacccgcaccgaatcattgtcgaggagaaccacgggcatcctggtgagccggaggcgatgcgcaaccgtcaaccggtgatagtcgtcaatcacgaacaaggcatccttctcggctgttattggcgcggtccatgagcctgcttgcaggatttgggcctttagtgcatcgaccctgtcagggttcacctcttctgttgggatcaattgtgctgcggagagaaggcaatgttccatgcggtccggcctcacgctcgctctttcgcatcgcacatatcttgattatccgcgttcacgtctagtctcctgcgcgttcgctgcctcgtcgctcgcaaatgtgcaagcgacagcggccggcgaggcgcggtgaggatacccacatggcaaaatggggtcatgaactagccgggaaggccgacggcctaggccggatggtcggccgcaaggcgtgccttcaggtcgttcagatagccttctgcatagtgctgcgccattgaaagcggcagattaatcccggccgtcgcggcctcttcaatcgccttccttgcgagcccgttgcgaatagccagcttgaccccgggtcccgagacaaggccgactgcttgtgctgcgacccctatgccagcttctatcagcgcctgcttcatattgcctccggtaatcgctgtacggaggagatttgcggcttgcgcctcgcatgcaagcgtcatggatacgagatcggccacctgtccgattcccggaatgaagctgagcactcccacggccgttgcagcccagtcaagcactttagatcctacccgcagcacggagtcgacgacatgcatgagggctccgccgttctttttcggtgacttgatgtcaggctggtccgccaggcccatcttcatgtctgcgacagcgttctgcgcagcctcagtttccggcacatggaactttggctgctgaacggtgcggtttgccgtagtcatatttgtgtagaaacggccaaagtcttctttgctgacgttgccagaatcgaccgtatgtccgccaccgaagtcgaaaaatccatgatgagtcttatagcccgtaatcgcattgtttagcagaccgaacagaagaggatctgaaaggagctgcgaggcagcttcacgtactttcggatccaagctcttgtcgtctgccatactcgccagcttgtcgcgtgtgagatcaccgctcccgaaaaataactcctgatggctgttaattgtcttgagcgtgtccagctcggcttgtgtgaggctcatcgacgaggaggccacttgcaggaagtcctctttgtggaccttatctatattaccaccgtacaactgcttccattcttccggatgactgacgaagtattgagccgccgcaatgacctggggtggacatttgcctgttttcgcttcgccgtcgacgatctgcttgaagtcggccagactcaggttcttgggaagatattccgagtaccggtaaagctcccgtagagcatcgttctcggtcatgaccgatggctgggcattctcggcgctgtcggatgggatgtagttctgcgcgtagctttgcgcttggctttcctgaaatgcggcaacttgtgggtgatgtttggaaaattcagacaagtcctttgcactgatcttgcctccacagcgaccatcgccttgcgagccgattgcataaaaaagttcgggatcctgtagcaatgcctcgattgccgctttcagatccggcggagtagagggatcattggctttagcctccagcgactcccaactgagtgggcacagatccttgtgacggttcagcactgcgacaatctgcaactcaggcttagtcagcgatccaccgttccaggtaattctcgagctttgtatgggagctggcgcgacataatggtcatcgatcacaacagccgactgcggggtctgatccattgattcgatcgccgccctcatgtgggggggcagtagggccaaagggtccttctgcaaatcctccaaggtcgactcggcatccggcggcggcaggtcctcccgactggctaaaggaccaatcctgtctagcatgttagtggacagcatcgcctcgaaggacaatacgctttgctgcccctgggctacccgaggcgcgaaagctttggcgagcgacgcctgggcgaactgtgcaggattagagctgatcattggtaaaaggttgctggccgacattgtgcatcctcagacgtgatgttgtccctccacaaggaccttctataaggcgcttgcgctcacgaagtgacaatcttaaagcctcagctggagtaaccgtgcttttgattgcttcgctccatgctagctacaaaggtcaattccggcacaatggtcggcgacatcgttggagctaccgattcacatcatgagcggtttagctttcgagaaactgacgaggctcagacgaataacaatcaagaggtgaccgcagtgaggttctaatcctaaagtctgaatttcatttcttgctcagctcagccttcccgccatcgtcgttctctggcagcatctcagaagtataaaagacttccggtctcccgccgcggacgaccgtggtggaggagccccgaaacagtaccatcacagattccctggcgggcgtatcggttgcgcgaggctgcgcctgcgccactgccagtagaccgttcaacgtctgctcgatgagcgccatgaagcgcggcgggccggacactaagaccaggccatttcccggcgcgggtctcaccggatagcgctcatcagagatgtcaagcttatcgagggcgagcttgaaagcactaaagtgaactgaactcaacacaagcatccgagtttgtgcttcttttgcagcagacacatagagcacaaccccgtcataataccattggagatcgtagagatcggtcaatcggtcgaggaactcgcgcggtgacaactccggtatacgcccgcgaatccgccccttcacctctgcgctgatgttaacactgattttcaggttgttgccgaactcctgcaacgcggcagagagatcctgatctagaaccgtatacttataggaggtcgaggggagtggcagggtggccccgagagttgtgtggattccggcaaatagaaaaagcccgacacagagcagtctcctaaacatatgaagcggtgtgaatgggatcggcgttgtcggcatctcgtcttgataaaccaaatctgaaaatctcccatgcggttcaactcgactaacatcactcttcaatgggcaagcgacgctgccggtagtcagcgtgtcgtcagctcgcctcgctagagttccacgtcaaagagttaagtaatcgagtccttctcatgatgctgcctgtcacgtcaatctctaacagtctccccagggtcgcgtcatcgtcattcggcgagcaggctcagtttgagcgtgctctggcacaggcggctgattcgatgaaaaacgatactgcttcaacgccagtgaggacggcgcctatttctccgccgatggacgttcaccgcgcggcgccaacgagcccgctggaggatcgcgtgctgcagacgatttcttcgatttgcccggatagtatagttgctgctgccgcgcccaaccataaggcggcccttataagcggcgctccgcccgggccgtcgcagaagctccctgtcgaaggtggggcgggcaccgaaaggttgggaatcccgcaaggggggcatgattttgacgtgatggttgccggtctgcgggatctttataatggcgtgacccaagttgctcttgtttcgaagggtatcagcggcatcacctcatccgtaaacaaactattaaaggaagggtgagttgcgcgcatgttcggctcagcccatggcgacacaacgagcagcgacacgtctggccggcgaccgcttcgcctcgtcgtgctgccacttctcctggctctgagcagttgcaaggtcgatctctatacccagctgcaagagcgcgaggcgaatgagatgctcgcgcttctgatggacagcggggttgatgcggtccgggtggccggtaaggatggcaccagcacaatccaggtcgacgaaaagttgctcgccttctcaatcaagctcctgaatgccaaggggctgccgcgccaatctttcaagaaccttggcgaaatattccaaggttcgggcctgattgcatcaccgaccgaggagcgtgcacgttacgtctatgcccttagcgaagagttgtcgcatacgatcagcgatatcgatggcgtgttctcggcgcgtgttcatgtggtactgccgcataacgacctgctgcgagcaggcgacacaccgtcatcagcctcggtctttatccgccacgacgccaaaacgaatctcccagctctgctgcctaagataaagatgctcgtcgccgaaagcatcgaaggcttggcctacgacaaggtagaagtggttttggtgccggtggaaaggtccgcacaagagcaacggtctttactggcgactgacttggctcaagcatctaggcctatcccagagccgctcctggctgtcgcggtgggtgtttccgctgcagtgttcgctgtgacgtgttacctcttgttcatcgttcttgggcatcggcgcaggcaattaactggcgaactatctagagtccaggagcgccccggtgtttccgctctcgcggctattcgtaaaaagataccggggctagggcgtaggtgaaattaccaatgccgatagcgatacagactacccaacctgatgtttcgttccaatcgcactccgtttccaggagcgagcttgctgcgtcgacccatccgacgcgtcttgccgcccgtctcgatccggagttgtcggctgcgacagtggtgcagttgcagaagtgtgcgaggcttcagccacgactggcagaattgctgcttggcaatgacatggattggaaccgaatcggatgggggcccgatctcctgcgcggccatgatcctcgtcgcgctgctcttcttgccggaagtatttggcatgcccgttcgcttctgaaagtcgtttctcagcgtgacctcgcccggctcgttgaacgtattggcgctgatgcgcacgcatttggcatccgacatctggcgcatgctatcgcagacaaattgatctctgatccggaaaaacttgcgttgcaaatcgaacacgatggacatgcttgtcttggtgcttggctcaacataaggccagcgcttgagcggaatcgcgtgcttctacgcttgccgctcggtacagccgcggagaacccggcgcctgagcacgatggtgcctcaagcgggttgttttcgctcgtgatagcccatttcgagatggagagcccgtaatatgacagccgacatttcagcggcacccgtcgcgccgcagatgcgcccattggggccactgatacccgcgagtgagcttaatatctggcacagcgctggagatgcgcttgccgcagcaaaacggcatcagcagcgggtccgtacctgggcacgcgccgcttatcagagggagcgggcgcgcggctacgccgaggggttgaatacaggcgccgaggaaatgtcagggctgattgcacgagcagtcaccgaagtagcgcaacgaaaggcagttctggaaaaggaattgccacagcttgtcatagagatactgagcgatcttttaggtgctttcgatccgggtgagctgttggtgagggctgttcgtcacgcgattgagcgcagatacaacggcgcggaagaagtttgccttcatgtgtgtcccacgcaagtcgatatgctcgcgcgcgagttcgccggttgcgacggacgggagaagcggccgaaggttcgaattgaaccggatcctacgttgtcgccgcaagagtgtgtgctgtggagcgagtatggcaacgtcgctcttggacttgatgcgcagatgcgcgcgctgcgccttggcttcgagtacctttctgaagaaggagaactgtgatcactccggtaccacagcataatagccttgaggggactcctctcgagccagcgatctcgtctttgtggtccacggcaaagagaatcgatacgcgcgtcgtgcgaggacggatcacgagggctgttggtaccctgatccatgccgtcttgccagaggctcggattggggaactttgtctgctgcaggatacgcgaaccggactgtcgctcgaagcagaggtaatcggcttgttggacaatggcgtgctgctcacgccgatcggaggcttggcgggtctgtccagccgcgcggaagtcgtctccactggacgaatgcgtgaagtgccgatcggccccgatttgcttggccgtgtgatcgacagccgctgccgtccactcgacggcaaaggcgaagttaaaaccaccgaagttcgtccgctgcacggcagggcgcccaatccaatgacgaggcgcatggttgagcggccattcccgcttggggtgcgcgcgctcgatggtctcctcacatgcggtgaggggcagcggatcgggatttatggcgagcctggcgggggcaagtcgacgctaatatcacaaatcgtaaaaggtgccgccgccgatgtcgtcatagtcgcgctgataggcgagcgtggccgcgaagtacgtgaattcgtagagcggcatcttggggaggaaggcctccgccgtgcgatagttgtggtcgagacctccgatcgctcggcaactgagcgggcgcaatgtgctcccatggcgaccgccctggcggagtactttcgcgaacaagggctgcgtgtcgctctcctgttggactcgctgacgcgcttctgccgtgcgatgcgcgagataggtcttgctgcgggagagccgccgacccggcggggcttccctccttctgtttttgccgccctgccaggcctgctggagcgcgccggcctgggtgagcgcggttcaatcacagccttctatactgtgcttgtcgaaggtgatggcacaggcgatccgatcgccgaggaatcgcgcggcattctcgacggacatatcgtcctctcacgcgctcttgcggcgcgatcccatttcccagctatcgacgtgctgcagagtcgcagccgagttatggatgcggtcgtttctgagacgcatcgcaaggcagcatccttctttcgtgatctcctcgcgcgctatgcagagtgcgagtttctgatcaacgtcggcgaatacaagcaaggcggcgaccccctaactgaccgcgccgtcgcgtcaattggtgagttgaaagagtttttgcgccagagcgaagacgaggtatcagattttgaggagacggtcggatggatgtcgcgtttgacctcgtgaattatgcttacgcttcaaggctacggcttttaaaggaaatgcaagagcgcgacgcccgtaggaagctgtcgaagaaggaagctcagcaccacatggccatcgtagccgcacagaatgcctctcgggagcttgaaatcgcacagcaacagcgtgctggaaaggaagctcaactctaccaagaactgacatcgctgaacaccttgtctagcgccgcactcgaccatcaccaccttcatatagagcggcttgcggctgagatcactatccgaggccaggtacttgacgacgcgcgcatcgctcaagagcaggccgagacagcggcgtctgagacaaaggccctgtgggtgaagcgttcggaagcacggcacaaatggcaacagatccaggacgacctccggcgcgccgtcgatattctttctgaagccgcaggtgagatagaggccgacgacgagatattgctgcggtatgggaggggttcgctcgaccagaggtcacgcaacgagttccggtaactgcaagtttctgattgaccgcacgtgcagctaagatccgctttgatgactggcgtggccagacgcaccatattcgaaccagcgctgacactgtcccccgaggtcgtcgcgtggatcaacgacatagcggcttcacgcgggccgtttcagagccgtgtcggcgacaaaccactttcggtgtcgatggaaggacttgtttggcaacacgagtcttctgccattccgatgtttgactgcgtttgggatttgggaggtgaaacggtcgtcttgtcgctctctcggccgcttgtagaggcgctcgtctcgacagtgcagagcgggcttgcttttcctaccgagccaactgcatcgctcattctcgaacttgcgctcgagccgctcatcgctcgactggaggataagacgaaccggaccttgcatctccttcgcgtgggtaaagccataacattggctccttatgtggaactggagatcgtcatcggcccggtcagtggcaagggtcgcctgttcctcttctcgcctcttgatggcttggtgccgtttgcgttccgcgcgctggccgaactgcttgcccagttgccgcggcaaccgcgcgagctttccccagagcttccggtgataattgcaggtgagatcggcacgcttcgagcttcggcggcgctccttcgaaaagcatccgtcggtgatgctctgttgccagacatatcgccgttcggccgtggccaaatcgctctgtctgtgggtcagttatggaccagggcagaccttgagggcgaccacctagtcctgcggggacccttccgcccgcaatcacgccccttggagtgtgcgcatatgacagaaatcgaatcgcaactaaggccgtcggatgccgatctcgatgacatcgagatcgtgcttgtctttgaatgcggccgctggcccatctcgttgggcgaattgaggagtgccggcgatgggcatgtttttgaacttgggcggccaatcgatggccttgtagacatagttgccaatggtcggtgtatcggacgtggcgacatcgtgcgcatcggagatgatctgggcatcagactccgtggaaggttggcatgcaatgactgaaatgcagccggcaattctggcccttcttgcgataaccgcggcactcggcttgctggtgttagcggtcgtcacaaccacggcatttgtaaaagtatctgttgttctattcctcgtccgcaacgcactcgggacccagacgataccacctaacatagtgctgtacgcagccgcacttatcctcaccatgttcgttagcgcacccgttgctgagcagacctatgatcggataacagatccgagactccgttatcaatcgctcgacgactgggctgaagccgccaaagcaggaagtcagcccttgcttgaacatctcaagaagttcacaaacgaagagcagcggcgatttttcctctcctcgacggaaaaggtctggcctgaggaaatgcgcgctggagttacagcagatgatttcgccattcttgtaccatcttttctgatatcagaactaaagcgcgcgttcgaaatcggcttcctcctttatctaccctttatcgtcattgatcttatcgtcacgacgatattgatggccatggggatgtcgatggtatccccgacgattatagctgtcccgttcaaactattcttgttcgtcgctattgatggctggtcaagattgatgcacggacttgtgctcagttatacgatgccgggagctttatgatgaccggatccagtattgttagtctaatgagccaatcattggtggttttcatgatctggattctgcccccgctcattgcatcggtgattgttggcctaaccattggcatcatccaggcagcaacgcagatccaggatgaaagcctgccactcactgtgaagctcctggtcgttgtcgcggtgattggcctgtttgcgcctgtgctgagcgctccgctcatcgagctcgcggaccagatctttaccgagtttccagcaatgacactcggctattagtctgcgctatgtatttgtcacctgccgagattcagatcttgctccatgcggctatcgaactcgttgcggcagccggtcttggagcggcccgcgcgctgggcataatgctgatccttcctgtatttacacgatctcaaattggcgggctgatccgcggctgcctggctatcgccttcggactaccctgcttggcacacgtcagcgacggattgcaggcgccggatccggaaacaagtctgatccagataccccttctcggactaaaggaagtgtttgtcggcgtgctacttggcacttttctcggaattcctttatggggccttcaggcggcgggtgagtttatcgacaaccagcgcggcatcaccagcccgtctactcaggccgacccagcaacgaacagtcaggcttccgctatgggagtatttctcggaatcactgcaattacgatcttcgtcgcagcgggaggcgtggaagctgtgctgagcgccctctatggtagctactcaatctggcccgtatatcggtttcagccaacattgagtacccaaggcgcagtggagttattcgggctcctcgaccacatcatgcgcacgacattattagtctcggggcctgtagtgttctttttgggactgattgatatatcaatgatgatgctacgtcgctttgcgccacaattcaaatctggccagctctccccgccgatcaagaatatcgtctttccgatcatcatggttacctacgctacctatttgctcgagggcattaaacttgagatcacgcaagcggacggcacgcttgggtggctcgacaagttgctgaaatgagcgatacgagcgaagagaagtcacacggcgctacccctaagaagctgagcgacgcgcgcaaaagaggtcaaataccgcgtagctcggatttcgtccgcgcggccgccacttgcgctgggcttggctacttatggctaagaggtagcgttatcgaagataaatgcagggaagcgctactattaaccgacaagctgcaaaacctgcctttcaatctcgcggtccggcaggcgctggttctgctagtcgaactcaccctggcaaccgttggcccgctgctctcagctctttttggcgcggtaatcttggctgcattactggccaatagaggatttgtattctctctcgagccaatgaagcccaacttcgataaaatcaatccttttcaatggctgaagcgcttggggtcggcgcgttcggcagtcgaggttggcaaaacgctgttcaaggtgttggttctcggcgggaccttttccctcttctttctcggtttatggaagacgatggtctatctgccggtctgcggaatggggtgtttcggcgtcgtctttaccggagcgaaacagctgatcggaattggcgccggcgcacttctgatcggcggactgatcgatctgctgttgcagcgtgcgctatttctgcgcgaaatgcgcatgacgaagacggaaataaagcgcgagttgaaggaacagcaaggaacgccagaattgaagggtgaacggcgtcgcattcgcaacgagatggctagcgagcctccgcttggtgtgcatcgcgccacgttagtctacagaggaactgcggtgctgatcggtctgcgttacgttcgtggtgagaccggagttccgatcttagtttgccgcgccgagggcgaggccgcttcagatatgtttcgcgaggcgcagaatctgcgtctcaagattgtcgatgatcatgtcctagcgcaccaactcatgagcacaacgaaactgggcaccgccatccccatgcaatatttcgagcccatcgcgagagcactcttggccgcaggtttggcctgagcatccctgaattcggaaaagaactttgaagacattgacttccgggcgtgattcctttggctttaagtcgggacgcaatggatggcccaggaagaaacagtgctgccgcaagcacatcgcacggcgggatcatctggcaatcggtttctgcgaatggcggcaaacgtggctcgcgcttgtcgttcaggtttggcatgtccgccggtggcgacacgttgtttcaaatggtagttgtggctgagaatcgatagaggtgccgcacgtgttggggtcggacgtaacggcggccgcagggacgctggtccggcgcccccgccatatccgtgcgtgcagagttcccgcgtcatgacccgtgcccgggctaaagcaacagggtcgtagatttcgaatgacaacacgtctgtggcggacattgctcgtcgccacgagatcgatcggtcattttttctacagatggcgtcaaatgctgcgaacctctgcgataacgtcgacgcttcagcaaattggaaacgcggcggcgcaaacagttggcttaagcccaaacttccacgacacgtccgttccagccagatctgccacccaagccgataatggttcaatggttccgagctccggccgtccgcgcaagcagcaacagagccagtgaacccgagtatcggcaaatagcggcagaaagctttttgtccgcgctgaaagtcccactagtcagctgaacgtcagttgtgcgcgtctatcatcttgacccgttttccctaccagtcgctctcagtgcaaaaaaataggagtacaagatcaccatgtacggtcgaattgatagctcgtccgatttccattacacgcagagtgccagcaagcaaatggatgcagaaacccaagagttcgcggacacgtttgcccgaatgcacttagacaggtccaacggcggttcatcgtcggcggccagatataccctcgatcacgaacctccggtggtgccgattgatctcgagactttcaggagggagatcaggaaatttcatggcaaagaaatcactgacatcgccaacaatccacaggaatattcagacttcgtgtccgcaaaagccagacgcactgcggacgttgctcagcaatacggcattcgtcgggattctgagaacgctcgatatttcagttaccagttgggaaaccagtgtgttggactgatgagaacggaaggtgggttcagcatggaagaagagttcgaatccaaaagttggagagaccaatttcctggtcaccaagagattacctccaccgtggatcttcaagtcgcccatcctctcgttgagaatgcaggcgatattctgctcgagcaccaacttcggagggacggcgaacgaccgttgctgaactggcgcgcggaaaacccagaggcgaaagcccgtgcagcgatgatggggtttgttgaagtggatgattgcgacatggtccttgaccccaaacagcatcccgacaaatggacgcagaccagtgccgctgaatggcggcgtaaagacaaaccgccgctctatctccgcaaatttgaggatgccgaaaccgcacagtgttcaaccagctgctcttacgagacttacgaagatgacttcatgtgaccggattctcgccagatttggtcgcgacggccggccccatctgccaagaccggccctcatgtcacggacagggaacgaaagagcgttacaaactgccacgcgctaacgagcgatacccattcggtgtttaggcgcaaaggggcttgaacgcagggtttctttgagaccatcgtagtagttcgttcggggttttgcacccgagtcccgtaaaacacctcgaggccgttctttacattgaggccggagcgtctttgatgcccggcctcttttgccatcgggtggctccgacaccgcaatggcgatacgcaaagcagttggtctcgccggcccgaagtttcgtgtaaagcaagcctttgcgcattcgaggcttcatcgaacctgagagagcttcacgctcgcgcaaaatgccgaatttctcgccctgctggtccaactgcacacgttagcgtttttttgtcctggagccgaccggcttttcgaacaggttgtcgcttgctgtcggctgcccgttgtatgctatgtcactcaagtgcatcggactgagcgccgcctcggcctgccggagttccagggagtccagatcgtgcagcacgtttatatgcaatagcgcttctttttttgacaattgtcagcttttcgaaagctggagctcataagtagatgttatctacaattcgccgctaaggcaggagtagctgatggtcggagtgattggaagtggagttggctccatcggcgtttccctggcccgcaaaggggggcatggacattcgactggacagccgccgcgcgattcaggcgggccctctggtcacaacaggccggatcgcgggagcggcgttacggatggcccgaccatttctggggatcgctcgcaggctgcaattcaaagcgaagccttcgaactagctcttcgatcggttgcgctacaacttatgaacgatgccatggctgatgccgacgaagctatggcagaaactgaagaggatgcctgacgctgggtggcccccgtcaggaggtgcgtgccgttagtgacggcacaattgtaacagaaagggaaatgacatgtctaaaataggtactctcacgagtgcagttggagctggcgccgcggctggccagaacgtagcggccaaaggtgctggggctgcggccttccaggcccaaatcgcagaactggcagcggtgagcgcagaggctacggctaggagtatgctactgcgcactgttacgaccgagctccagacaaccaagaaggcggcggatgaacgcgtacagtgatgcggatggggctctaggcactgcgtagcacaattggcacgaagtggagccgagatgagccgcatgccactcgccgtgcggcttctcttttgtctggatatcgtcagtgaacgacgccatttcgcttcaattcaaagttatctcagggctctattgtgaactgactggtacgacggctctagaaacgagcttgatcggtagcggcctcgacgccgacatagtgttcgtcgagcagggcctcgcgccgcatcattttcgcgtcactcttctgggcaaaacacttgaggtcgaggcgcttgctgccggtctcagcatagagggaaacgggaatattgccgcaggcgagcgggttgtcgcgccccttcctgtcgtcattcatgcaggcgcgatgtccattctctggtcagtgcaggatgcagcgtcgtctggttcgatcggtaaaccacgcctctcgatatctgtgctcgccttggtgttgctcggttctctcgggatcggcgtgctctcggccattttctcttactacgacaacgctgttgtatcgaacgccgatttatctggtgaggcccgggaacccaagctgcctgataatcgcactgatgatgagactgcattcacagccgctaaagccctgcaacaggaagtcgacagagccggtctgtccaacattaagatcagcgccgctgagggtgttgtgacagtcgaaggcacggtcacgtctgcttcggccatcagttggcataaagtgcagcagtggttcgatcatcggacgaggggcgctctagcgctgttgaatggagtgattatcgacgatgagaaggcgccatccgcaatcgcagtcgaagctgtctggcgtgggtcgcttccgtatcttgtcatcaaaggagagaaatatttcgtcggcgctcttttggatgatggttggatggtcgaacggatcgaggacggtcgtgtaatgctaagccgaaatggccgccttgctgctgtcccgtattaaagtattccagcgcagggctgacgatcttggacagacttgatgaccggtcaacttcgcacttgcctttgaatcttatgcgcagccatccgccgcaggggtcggcctcacggacgacgcgcctgcggtcttagagctacgttgcacctgtgtagcagcagagtggttcagaaacgatcgtgaagggacctcatggccaacgccctgcgtagattcaccgagtatgcgccggccaatccggacttgatggtcgcgttgatgctgcttctggccgtcagcatgatggtcatgccaataccggtcatggcggtcgatgcgctgataggcttcaacatgggtttggctgtactgctgctgatggcggccctgtatgtcagcacgccacttgatttttcctctttgcccggcgtcattttgctttccacggtattccgtctggcgctcaccgtcgcgacgacgcgactaattctggccgagggcgaggcaggcagcatcatccacacgttcggcagttttgtgatctcaggcaatattgtcgtgggtttcgttatatttctggtagtgaccatggtgcagttcatggttctcgcgaaaggcgccgaacgcgtggcagaagtggcggcgcgcttcaccctcgatgctttgccaggcaagcaaatggcgatcgacgcagagttgcggaacggtcacatcgatgccgacgaatcccgcaggcggcgcgccgcattagaaaaagaaagcaaactttatggggcgatggacggcgcgatgaagtttgtgaagggtgattccatcgccgggctagtggttatctgcatcaacatgctgggtggaatttccatcggcctgctctcgaagggcatgtcgttcgcccaggtgctgcatcactacactctgctgacgataggtgatgcgttaatctcgcagattcccgccctgctgctctcaattacagcggcaaccatggttactcgtgtaactggggcttcgaaactcaacctcggtgaggacatagccaatcaactcaccgccagtacacgagcattgcggttggcggcctgcgtcctggtggccatgggcttcgttcctggtttccctctgcctgtcttttttatgttggccgcagtcttcgcggcggcaagcttcgtcaaaggtgacgtcctagatgccgacaaagtcgatgctacaactgtaactccggcggagtctcaaacgccaaacgtggctgcgcagccaaatcccattggcgtcttcctcgcgccgagccttacgaatgcgatcgaccaggtcgaattgcggcagcacattgcgcgtatttcccaactagtctcggccgatctcggcattatcgttcctccgatcccagtcgatgtcgaccagcagctgcccgagtcgcaattcaggatagatgtcgaaggcgtgccagtcgaacaggatttgattaatccggcgcagctgtccctcgcagacgatctgaagaagattgagtcaagcggcatcccttttcggcatgatcctgaaacccacagaatttgggttgaacaaagccacgagccggcgctcaaagccgccggtatccggcatcatagtcccagcgaactccttgcgatgcgtgtccatgcgacgttgacttgccatgcgccgcgcttggtgggtatccaagagacccgccaactactgggccggatggagcaggaatactctgatctggtgaaggaggtgctgcgtaccacgccgatcccccggattgcagatgtgctgcgccgcctcttgggcgaaggtataccaatccgaaatacccggctcgtcttggaggcattggccgaatggagcgaacgtgagcaaaacgtcgccctgctcacggaacacgttcgttctggaatgaagcggcagatctgtcaccgctatggcagacacggtgtcctacctgccttcgtcatggaacgtgagactgaggatgtggtgcgctgcgcggttcgggaaacggctgcaggcccctacctcgcactagaggatcggcaaagcgaggcgctgctgtcacagatgcggcaggtcttttcgagcacggcaccgggccagacgcgcccgatcgtcttaacttcaatggatgtccgacgcttcgtccgcggttttcttacccgaaacggtatcgagcttgccgtactgtcttatcaggacctcgcctccgattttaaaattcaacccgtcggatccatcaggctcccgcccagtaatggaacgtcaggggaacctcgcagtatccgcccttctgccactactggatgataggtgagaaccaaacatgaattcacatgagaatagagtcgccgcgccgttgctttcatttcgtttgagcttagttctcttcgcagtactctccgttctgcctctcggcggttgtgctaggtgggataaccccgttctttcagtgaaggagacgtcagccgcacaattgctcggcgccaaccaaatcaatgcggctacgcgccaacgcattttgcgcgccgtcggtgaggacgctcaagagcgggctttgcgggatgatctgaagcagcatccaggcaatgtcgatgcggcaatccgtcttacaaaagcattggtggcgcagaaacgtccgcatgaggcgcttcaggttttagacaacgtcttggtcgtgaccccagacaatttgcgtgcattgaatgcgaaggcagtcatcttggacattgaggggcggcatgacgcggcacaagagctgtaccggcaagctctcgaaaccaacccagagaatcagatgttgcaccataacctccatctgtctcttgcgtttgaagggaagtccgaacagaggactttgccacaatcgcgataacgttgctgtgatgaattcacctttgagaagcagacgcagcacgtcgtgcgtgcctggggacgaggcaggccctatagcaattgagcgctgaacacgacattaaagggacggaactgagcggctaatcctattttctgacagcggctctggtttgaattggcgctgtgtccgtggcgctcgacaccgagggcgcggccggcgcgcggcgtacagcgttttgtcggtccggttattgaccttgcccgcatccgcctatctcagggtcgcgttaccgctgaactcactgccgttgtcctgacgatcatcatcggttcgctgcgctccaggataaatcccagccgagctcacgggtgcaacacgcaggccagggccattataagagtagtgcgtaaagggggctcatcaaatggagccaatttggttccctaggcgattaaacagcatgcggcatcaaaagtgtcaccctacagaatatttatagcattaatattgccccatagtgttgcttctgcgtaaccgtatttaacatagggtcaagtgcgtgatgcctatacgcggacaaaacgaaactattccctcaaataagcagaaggatgtcgacaagaccttgaacaaacttggtacgaagttttctggcacgcgtgataagcacctaggatacccgtacaacctcgactttgaccacagaccaatctctcaatcccacaaatttctaaataacatgggtgccatatgtcggctcacactatgcgaccgaggtctgtgactagagtgcgaggtggtcgactggaccatgcgggtcggggagtgcgctgatccagaagaatactggggaactgtgggcgcaagtgaaactgaaggtaatcgatggccatataccttgcgcgcgagacccttgataatcctattcttatacactcgacagagggtagtgtgctgaaggttctgcagaattctctgagaggggcggttatggcagcctggtgatgacgaacgtggatcatgacgtgctgatcgcaacgctcgaccggctgaagctgacggcgatccccgaccagctcgacacgttgctggacgaggcagcgcgttcgcgagcgtatcgaaagaacgatcaggcttgggtcgagcagaagaacggcgcgatcgtgcgacggctggtcggttacggaaggctcgtcggcgcggaggcgacggttgtgcttgggcggctctacgacgtggtgcgtctgtacggcaatctgttccagccttcgttcaagctgcgagagaagacacggatcggcgcccgcgtcgtcaaacgctaccatccgcccgtgccgcctatcgcgcgggtggttgcccattccggtgtggccgaggccgataaggagcggctgcaggcgatgttggaaagggaagatccggtgatgctgtttgccggaattcgtgccgcacaggaggagctcggaaagcgggtcgatcgccgtggcttgaatgccgggaccgaagaaccgctcgccatcgatctgcagcgattcaccgtgagcttgaagacagcctggcaggctggagagaaacggccgacacatcggcggccctatcggcgaaccaagccttacccgaaaaggccgagcatgctggagccattcgagccccagattcgagcgtggcttgaggcagatccggcgctctcggcagcccgcggtgctccagcgccttgtgagcgccgatccgtcacgcttcaccaagaaagcgctgcggacggtgcaaatggccgtcaaggcttggcgcatggaaatagccgggcagatcatactcgatggcaactggatgaagcgcgcgcccgtatctcctcccgccgcggcgcagggctgtccggggaaagttgcggctgaatcgaaatgtcgcaggcgcatgccccgtcagacggggattttccgtctaccttctggttgtcgagactcagaaagaggacggggcatgcggttcacacgtagcattcttggcaagctgattgaaccggtcaatcggcgccgcttccagacgatagtggatgatcacgacggggacgcctacgacaaggcgttccgcagctgggactgctggtgctgatctatgcccagttgagcggtgcggagagcctgcgcggcctggaggccggctggaacgccaacagccatcaccactatcacctgggcagcgaccgcttgccgatgccaacgcccgccgcccggttgccgtctttgccgagaccttcggcctgcttgccggccaactcgaccgacagacgcgccgcgagggccgggccatgctgcggctgatcgattccaccccgatcccgctcggcaagctgtgcggctgggccaagtcgaacggccgcatccgcggcatgaagatgcatgtcgtctatgaccccgacagcgactgcccgcgcctcctcgacatcaccgatgccaacgtcaacgacgcccagatcggtcgcaccatcgccatcgagagcggcgccacctatatcttcgacaagggctattgccactacggctggtggacggcgatcgccgaggcgaaggcgttcttcgtgacccggccgaagtccaacatgggcctcaaggtggtgcgccaacggcgcatcaaggtcgccgagggcgacggcttcaccgtcatcgacgacgccaccgtgcgcctggccagcaagggtgattccaagctgccgatcccgttgcgccgcctcaccgtcaagcgcgccgacggcgacaccatcacgctgctgaccaatgatcgcaagcggcccgccgtggccatcgcggcgctctacaaaggccgctggcagatcgaactcctgttccgctggatcaagcagcacctcaagatccgcagtttccttggcaacaacgacaacgccgtgcgcctgcagctcttcgccgcgatgatcgcctatgcgctactgcgcatcgcggcgcgccttaaccgcatcaccatgccgatcctgcgcttcaccgacttggttatccgctgcctcttcgagcgccgcgacatcgccgccatcgagcggccgccaccggtcaatcccagccacaggagaccccggtgctccccccatcaaatgagcttcgcctatgtctgaatttccccggacagccctgcgccgcggcgggaggatatacgggccatctcagtgcccccaacttcagtaacattcctggatgaggcaatagggggggtcaattctccgattcgcttgacatgccggctctatctcccccgatgctctctcagaggttattcacgcaaatcgccatcgcaccgtcattctcgcattgacctgtggaccgaccatgaaagggggcgcacgacgatatcgcgtcctgcatcaaggttctggaccaagtcgggatcgatccgaaccgacgctttgtccacgtcgagggcgcgctgaatgcaatggtacttccctttgtcgatggcttacagaggggcatccgcccttctttccgccgtcagctacctgcgcagatgatgcgaccccgatgggatcgcgaaacggccacgccgttctcgcgatttggaacgggcgcatgcgccttgacatcgctggtttccgcaacaatcttcgtgcctgcatcgaacgcgcggagggcttcgcagcagcacttcgctcagtgggcgtcttggtattgctcaatccgtggtcattgacggttgtgtttccaaaacaatcggggaggctcgtcaacgaatatcaacacgcatgcaatggaggttctgcccacgcgatcgtcagccaagcgtcaaagcagatctcatctatgatcatggccttccttggaggcagcttcctgattgctggtgacggcctgacgaccggaagcattgtcgcgtcagcctcgctcttgtcgccggcctaggttacgccagctttatcttcgcatggaagcttttccgcgctcttcgcagccgtgttcttcggggaatggctaacaggtccagagtgtctgcggcactggctatcgtcgttggtgcgttgatcacttccatgcctgagcgccgtgtcgccttggatgtttctatgcgggcgtttatatggcgctgctttttgtggtggttgacctgcgagagcatcggcccgagccgccgcactacaatagaaaacctgtcgccgggggatagtgaatgtgcgcggcggactacggtaggtcagccgccgttgcaccgtgcctggtgcgtgcgggcggtcggccctcagcaggcgctcggcccgtaatcgggcctcgccaccgccggcatgccgtggctcgggtcctccctgcgcttacacggacccctgggcacgaatatcaggagcagggcttccggcccggggcaggggagtagggaatcgcatttgactattttggttgcatttggagggccgggggattcttgagataggcagttcgtggagcagaaaccgccattccttatcttgaaagctgtttcggggcgtctccatgcaaataggcccaattggcgaaggggagtagggcaccggtcgatccttctcccgacgaactgctcaagcacgtctcgctgctcagttcggagcacatcagtcgcgatcgtcgcaagcagcggatggtgccgccccggcgcgagtgggcttgaatgcctgaagaaagactccagcgagcttacggacgtatgcatgttgctcggtcgccatcaccgataagttccctttctccacaatcgcctcgagactgggcttgatctgcagctgccgaatccagccgactttcgatcgcatcttcatcggcatcattggcagcctggagggccaaaatcgtgtggcggaacagtcgcagcgctccccgatcccgctcagggtttcaacatcattctcggtcaggagcgcggcaccaggagatcgccaagaattgagcttctacagcgggtcggctatcgccaagcgcgggccatttttgaggcagcctacaccgttgccggcatagctgaagcttaaagaaaccgatgcacctcgcgaggtgagcaacggaccgtaagttcgccgtcagcttaacgaagcatcgtgcgaagcgcggtctaagcggccccatattggcaataaccgtgcgaagggaaacgaacgccatgcacagtcccatcagtggttcattcacaagctctacgcaagttcacgatccgattcatccagcgaacagcgatggtttcagggagacgcttgcgaatgttgaactccggacgaaatcaccaagtgcggagtgccccgataagatggggtgctgcgccagcaagccacaagcatctgatccgaacaatcccagtacctcctctcctgcgagaccgagcacctccctgttccgatacaggacggccgaattggcccaggcgaacgcagatggaatctgcgtcggcttgactgcggagtggctgcgtaacctcaacagtcatccgtcaatccgaatggaggccctagtacccggatcgcaaaggcacgcctcagccactgttcggcagaaggagtacgagaatctgaaggttcacctccgaagacaaggagcaggaccttctgaggccgacttcgcggcgcaaaacactatgttgcagaaagcaggccttgctccatccggaaaggagaaagtatacaaagtcggcgagcctaacttcccgcgcatgctaaccaagattacagccgacggatccaaccatttgctcagcttgtatttcgctgagggcggcgcacacaccgttgcgacctcggcaatggatggaaacaccacgctcttcgatcctaatttcggcgaatttactgtgcaatcagatcagatagatgatttgttccgaagcctagccaatcgctacagcaatccaaaccggcagcatttaacaacggtgaccacccaaaagatgacatgagtcgggcgtcctgcgcggcgtagtgttcactgaagtccacgtaaatcctcgtcgatgcttgtgctgaagaggtgggattttggtacgctgagcagcaatagctgctgcgtgcggggcaggaattggacgacgcgccggcggaccaggtgggtttgagcagcagctggccatctgcagctcagcttatcggagaactccgccgagccgatttcgcccgacactggttcggtagaggtgcatggaggtattcagcgcattagcctccgcggttcgatgctgatgccgccgcaatccaactggcaggacaatcggttcagcagtgtcgcggcacaggtcgacgttcctcgcgcccacattcgcggtcatgcaaggttctccatctgacttgcgcaacaggacttttcgacattccagccgatgaagacagctttgcagcgcgacaaccaagatgagacgccagcggcaagcacgaccaggtcgtcgattatcggcatgtcatccattcgctgcgcaaaaagccgatggcgctccttcagcttgtctatcgcgacaagctgtttccgcggcaggaataccgaagggccttcgagaccctgctcgaccggctttccgacaagcaggcctgcaagatcaccgtcgagctcttggccttggcccacgatcggggctgcgagcgggaactggcagagcggctcgctaaaacactcgatgcggacgaactgccggacatcatcgcgctgaggactttcttcgcgcccgatccggcacagttgcccaccgtcaacgttcgtctcgcctccctccagggctatgaggccctgatcgacgcgcgtcatctggaggacgccgcatgaaaaacgcccctgccatcgacgccgccacgctcagcacgctgcgcaatgaactccgccttccggccatcaaggtcctttggccggactttgccgaacgggccgacaaggaggggtggccagcggcccggttcctgtcggtgatcgccgagcacgaactggccgaacgcgatcgccgccgcatcgaacgccatctcgccgaggcgcgattgccaccgggaaagacgctcgacagctttgacttcgacgccgtgccgatggtctccaaggcacaggtcatggcgatcgccgccgggcgatagctggctcgccaagggagcgaacatcctgttgttcggcccgcccggtggcggcaagagccatctcgccgccgcaatcggcctcgcgctcatcgagaacggttggcgggtgctgttcatgcgtacgaccgagctcgttcagaagctgcaggtggcacgtcgtgaactccagctcgaatccgccatcgccacgaagcccaaccgacatggacagtcgcgctgcgctgcgggcagcgatcgagacagcttcaacgacagaccagggtcaacgatcgcaaaaacaatcagtgctacgtaccgggtacgccgggccctgctgccaatggcaaccgtgatcgaacgcatgggttgtcggcccgcgccattgcccggcgtcgtgcctaggcagctctgatcggagctgacgcttacgcgctcgagatcgatcctcgcttgcaggccccgcatccggtctggggggtgggacatccgggagggtgacgccacttagcctggctcgctggtgacttcaacgccagccgtcggtacgcgacagtcataacgcaggcatcaaactccgccagaagctcactgatgacgcggcagacgatgttcatcaagccaatcggctgcctgctctcgcaggtcaacaaccgcaaaatgcagcgccatatgaacgctcgcatagaaacatctaaggcgctgtgactgttcctcgccgcgatttttggcccctgcaggctgccaatgacgccgatgaagatgcgatcgggactatagaccggaaagtcgctgacaccggctgctgcagatcaagcccggtcttgaggggatggtggagaaaggggaggtatcgcctctggtgatagcgaccagcaacgagcacacgttcgtaagctcgcgggaggcttccttccaggcgttcacgttcgactcgccccgggggctatagacgaacaccttatgcccaagcccgactgagtgagcatgttacatgttcatccacggtatggatgatagctatgcaaaaactcgatttttccattctcgcgaaattcgattaagaaactcgtacaggttggaggcagagtggacagtcagacaccggccacgcagatatgattggcaatccgtccgcggatgcattgaggcaggcttcatgagcgaattcaagtggggtcacattcgcggcgatctgaattctcggctccccagctatagccgcaggcagcgcaatctcgggtgctcacccgtacgtgcgtgccctccagtacatcacaagccctcgcttggtttagctcggtgcgacggaaatcgacaggcgccgccgccgagggtgctgaattggcgcaactggcagattcatgaggcacttgtttgaaagcaaagctcggtcgatctattggccgcttcggcgacgagcggggcaacatagctgttctttgctttacaacggcagcgcaacgccgaacccgccaagcgttttttgaggagacctgctccggcttgagttcggaagacacttcccgagacactgcatcgccaggtaacgcatctcatcggctccgttgaagctcagtttatcgcgggtgccatcttgtggcccacaaacaccacttacgaggagaagacatcaatggatcagcccgcttggaagaatccgcgtacggccctgatcgtcgatggcagtgacgctgcacgtcaacggcgtataccgaatctggcgtcggtcgacctaaacctgctagtggagctcgaggccttattgcagtatcgaaacatcacgcatgcggctcaacatgtcggtaggagccaaccggcaatgagtagagccctatcaaggctgcgtgacatgttcaatgacgatctcttggtacgcggctcgagtggcctagtcccaacaccgcaggccgaacacttggcgcaaatgctgccgtcggtattgaatgctatccgcgaactggtgagctgcagttccggcttaagggatttgcggtcgaaggtaactatggcaatgcccgatcaccaatcgctagttctgctgccatatctattgccgcgtttaggtgagcgtgtgcctcatgttgacatcgtcaccgagccacttttggacggcgctctacggcgtctcgagcaaggtgagattgactttgcgatcgggcagattggtgccgctcctccaggctacttgcggcgcggtctctatgcggaccgcttcacttgcctgcttcgccacgaccaccctgcattagagcaggagtggagcgtcggaaccttcgcggcgctgcgtcacgcctctattgcctcggattccaacgagggcctgggtcaagtctatgatgggctggtcaggttcggactacccggtccgatagtggtctccaacgtgctgactgcggcagttgtagtggcgatgactgacctagtgctgatgataccgaaccgagttgcaactcgggtggcgactatgctgccgctcgctattgtagatccacccgtggagctgaagccatacgaagttgcgttgatctggcaccagcgctgccatcatgacttggaacatcgcgtgctgcgtcgcgaaatcgccgccgcagcgcggatgggccggctagacgtgtcacaagaccaaagggcgaggcggcagaacgatagttgaactcaccgctgaacggaagggtgcagcgaaggacagcccgacaccgcgtgcgattgatcccatcaagcgccgggtgtttgacgctttagcttcctcaaggcatcagttcatctcggggttctcgctgccatgtcatcgcactcgccgtggacgctggcgccactctgctaagtgccgctttgcatcgtcaacatttgacctatattgcactgcaacaatggtaggcttgcctgatccaccattatggtcacaggttcccttcaagcgggaacgcgcgctcgctgcgcacgatagaaggagttccatctcatgaaaaatttaatccacaacgtgggcccaaacgacgcccgtagggaccacgtcgatataggtgatgcggttcggcgatctcgcgaagcggtcggatatagcgtcgacgacctcgcattaacatgcggtctgacatgcgccgaaatttcaaggatcgaattaggtgctgatgtcgaccctgaacggctcaggcgtgtagtcgctgcccttcgagtgccagccaccaccttcgcattgaaacattcatgaacagcattcagtggaaacaagctccgcaagctcgagtatagtccccgacgcgattgccacctatgccgacaccctcatttcaataggtggcgtacagtcgaaccacacgcggagtgtcgctgcggttgcagcgaagaccggcatgaaatgcctcctggttcagaacagttgtgccatcggccgtgatacacgacccggcgcttctgcattcctatgcacatcaatccagccgagaacatctcggtatctgtgcgagaacgacttcaccatctgcgtcggcggcgaaatcatcgataaatcagtcaggcctggaacctcttcgtcaacaacaaagtgcttcgtcacctccataaagtcaggcaaatgggcgcaggtgaaaacttaaatgcaatcgagtcgacattcaccctcacgagttctcctaacgaccaaactcttctcatcaaacgttcgtgctcctcaagttccggtaccgtgctaatgcccagagcggaaagaacttggagtagccgtgatatcgcaaataaaacacccgcggaaaacccgtggcggtgtagcgctgctcatcccacagaccgttctcggtttgtgcgttttttaggtagttcaccccgcgtgcgacggccggatgctccacctcgccggccgccatcagtccaagcaaggcccacgccgtttgggaggacgtggaaggcgcctgctcatatccgctatagtcgagtcggtagctgattgcatcctcgccccaaccgccgtcccaactctggatggatactagccattccaccgccttccttatcatggggtcttggtgatcgatccctgcggcattcagcgcgcacaacaccgaccaggtaccgtagatgtagttcaggccccagcggccgtaccatgatccttccgcgtgttgggtgcggcgcaaatatgcaatcccctcggcgactgccttgctcctttgggtgaattcgccgacctgggccaacatcgagacgcaccgtgcggtaacgtcttcggtcggcgggtcgagcagcgcgccatggtccgcgaatgggaggttattcaggtagtattcgagattgttgacgtcgaaggcggcccagccgccatcccggctttgcatgccttcgatccattcccggccacgtgcgatcgcggtggcgtattccttgctgccggcgtgccgctgcgcgcggtccatggccatgaccaccactgcagtgtcatcgagatcgggatagtgcgcgttgttgtattgaaacggccagccgccgggcctgatgttgggcgccttcactgcccagtcgcccttcacgtccagtacctgccgcggcttcagccagtccaggccctgcttcgctttcgccacggcgttagcgccgcccacctcctgaagtgcgtggcacgtcagcgcggtgtcccagaccggcgacaggcagggctggcaataggcctcttcctcgccgatcaccaagagcttgtcaatagcgcgacgtgctatcgcgcgcggcggaaaatgatcgtctttaccgagcgcgtcatacatcatcacgatattggccatcgacggatagatcgcgcccatgccatcttcaccgttgagccgctcttcagtgaaggcgagcgcactcgcgatcgcgcgctcacgaagtttcttcggaagatgcggctcaataacccgcaggatgccgtcgatgccgcggaacagcaagaaccagccccagctctggtgcggcgccttcgggttcatgcctacgctcttggtatcctgaaggaacagttcttcgatgccgacgcccttaggattcttcgcacgcggcttcagcactgcaagaaccatcagcggcacaatagtggtgcgcgcccagtaggagatcttgtagaggtggaacggcgaccagattggcagtagcac

SEQ ID NO: 2 - DNA, 153 bp, Agrobacterium rhizogenes
cgcaaaagaaaagagccccctcaacgtcgccgtcgcggaagcccttctgtctctctagcgcgaacagaatcgcatttcctcgaatcctcgtcaagagtttttagcgccgttttggtgagctgatttcctttgcctgctgaaaggtgaaagatg

SEQ ID NO: 3 - DNA, 154 bp, Rhizobium sp. NGR234
cgcaaaagaaaaaggcccccagacggtaaccatcgtggaagcctctctcatcgtttagcagcctgagaatcgcatttccacgaatcgcagtcaagagtctttggcaccggaacgggtgagcggacgtcttttgcctgaggataggtgaaagaag

SEQ ID NO: 4 - DNA, 157 bp, A. tumefaciens BS63
cgcaaaagaaaaaggcccccgaaacggcgttccggaagaccttctctatagtctcgcagctaagagaatcgcattttcaggaatcccagtcaagagtcccgtgaggaaagtatcgtttcgacgagctgatttcttttgcctaacaaaggtacaagga

SEQ ID NO: 5 - DNA, 146 bp, R. leguminosarum
cgcaaagaaaaagccctccgaaacggtggttccagaaggcctctctcagtttggtcgcttagagaatcgcatttcccggaatcacagtcaagagtcaacgccacaccggcgtagccttttctttgccttgcgaaaggtgaaggaca

SEQ ID NO: 6 - DNA, 38 bp, Rhizobium sp. NGR234
caggatgtcgcgacagcgacgtataattgcgccctgga

SEQ ID NO: 7 - DNA, 38 bp, A. tumefaciens C58
caaggcgtcgcgtcagcgacgtataattgcgcccttgg

SEQ ID NO: 8 - DNA, 38 bp, E. coli
ccagtttctcgaagagaaaccggtaagtgcgccctccc

SEQ ID NO: 9 - DNA, 38 bp, Thiobacillus ferrooxidans
gggtaatctcgaagagattactctaagtgcgcccttgc

1. The nucleotide sequence as shown in FIG. 3 or degenerate variants thereof.

2. The nucleotide sequence of claim 1 which has been altered by mutation, deletion or insertion.

3. ORFs derivable from the nucleotide sequence of claim 1 or claim 2; excluding the ORFS identified as y4aL, y4hB, y4hG, y4hH, y4hI, y4nB, y4nC, y4sM, y4vK, y4xA, y4yC, y4yD, y4yE, y4yG in Table 3.

4. ORFs y4aA to y4aS, y4bA to y4bO, y4cA to y4cQ, y4dA to y4dX, y4eA to y4eO, y4fA to y4fR, y4gA to y4gN, y4hA to y4hR, y4iC to y4iR, y4jA to y4jT, y4kA to y4kV, y4lA to y4lS, y4mA to y4mQ, y4nA to y4nM, y4oA to y4oX, y4pA to y4pO, y4qB to y4qK, y4rA to y4rO, y4sA to y4sL, y4sN to y4sO, y4tA to y4tS, y4uA to y4uP, y4vA to y4vS, y4wA to y4wM, y4xA to y4xQ, y4yA to y4yS as identified in Table 3; excluding the ORFs identified as y4aL, y4hB, y4hG, y4hH, y4hI, y4nB, y4nC, y4vK, y4xA, y4yC, y4yD, y4yE, y4yG in Table 3.

5. The ORFs of claim 3 or claim 4 which encode the functions of:
(a) nitrogen fixation,
(b) nodulation,
(c) transportation or permeation,
(d) synthesis and modification of surface poly- or oligosaccharides, lipo-oligosaccharides or secreted oligosaccharide derivatives,
(e) secretion (of proteins or other biomolecules),
(f) transcriptional regulation or DNA-binding,
(g) peptidolysis or proteolysis,
(h) transposition or integration,
(i) plasmid stability, plasmid replication or conjugal plasmid transfer,
(j) stress response (such as heat shock, cold shock or osmotic shock),
(k) chemotaxis,
(l) electron transfer,
(m) synthesis of isoprenoid compounds,
(n) synthesis of cell wall components,
(o) rhizopine metabolism,
(p) synthesis and utilization of amino acids, rhizopines, amino acid derivatives or other biomolecules, or
(q) degradation of xenobiotic compounds, or which encode:
(r) proteins exhibiting similarities to proteins of amino acid metabolism or related ORFs, or
(r) enzymes (such as oxidoreductase, transferase, hydrolase, lyase, isomerase or ligase).

6. The ORFs of any one of claims 3 to 5 which are under the control of their natural regulatory elements or under the control of analogues to such natural regulatory elements.

7. Intergenic sequences derivable from the nucleotide sequence of claim 1 or claim 2.

8. The intergenic sequences of claim 7 which are regulatory DNA sequences or repeated elements.

9. The intergenic sequences of claim 7 which are ORF-fragments.

10. Mobile elements (insertion elements or mosaic elements) derivable from the nucleotide sequence of claim 1 or claim 2.

11. Proteins expressible from the nucleotide sequences or ORFs of any one of claims 1 to 6.

12. Use of the nucleotide sequences or ORFs of any one of claims 1 to 10 or the proteins of claim 11 in the analysis of the structure, organisation or dynamics of other genomes.

13. Use of the nucleotide sequences or ORFs of any one of claims 1 to 10 or the proteins of claim 11 in:
(a) screening nucleotide sequences,
(b) subcloning nucleotide sequences,
(c) amplifying nucleotide sequences by PCR, or
(d) gene trapping.

14. Use according to claim 13, wherein said nucleotide sequences are coding sequences or non-coding sequences.

15. Use according to claim 14, wherein said coding sequences are regulatory sequences, repeated elements, mosaic sequences or insertion elements.

16. Use according to any one of claims 12 to 15, wherein said nucleotide sequences or ORFs are oligonucleotide primers or hybridization probes.

17. Use of the nucleotide sequences, individual ORFs or groups of ORFs of any one of claims 1 to 10 or the proteins of claim 11 in:
(a) the identification and classification of organisms and their genetic information,
(b) the identification and characterisation of nucleotide sequences, amino acid sequences or proteins,
(c) the transportation of compounds to and from an organism which is host to at least one of said nucleotide sequences, ORFs or proteins,
(d) the degradation and/or metabolism of organic, inorganic, natural or xenobiotic substances in a host organism, or
(e) the modification of the host-range, nitrogen fixation abilities, fitness or competitiveness of organisms.

18. The plasmid comprising the nucleotide sequence of claim 1 or claim 2.

19. A plasmid which harbours at least one ORF of any one of claims 1 to 10 or any degenerate variant thereof or which harbours at least one ORF or any degenerate variant thereof which encodes one or more of the proteins of claim 11.

20. The plasmid of claim 18 or claim 19 produced recombinantly.

21. The plasmid of any one of claims 18 to 20 or any variant thereof produced by mutation, deletion, insertion or inactivation of an ORF, ORFs or groups of ORFs.

22. Use of the plasmid of any one of claims 18 to 21 in:
(a) obtaining a synthetic minimal set of ORFs required for functional Rhizobium-legume symbiosis,
(b) the modification of the host-range of rhizobia,
(c) the augmentation of the fitness or competitiveness of Rhizobium sp. NGR234 in the soil and its nodulation efficiency on host plants,
(d) the introduction of desired phenotype(s) into host plants using said plasmid as a stable shuttle system for foreign DNA encoding said desired phenotype(s), or
(e) the direct transfer of said plasmid into rhizobia or other microorganisms without using other vectors for mobilization.
